United States Patent Application Publication US 2008/0301839 A1 - sequence listing, part 3

SEQ ID NO: 10381 - protein, 496 aa, Burkholderia cepacia R18194
MNQPTFEDWQARAAVLRVEGRAFIDGDARHAHTGATFACVSPIDGCVLAHVADCGADDVDLAVAAARRAFDARSWAGMNPRTRKAVLQRWAALMREHLDELALLETLDTGKPIADTTAIDVPAAAHCVDWYAEAIDKVGGEVAPVDHHLVGLVTREPIGVVAAVVPWNFPLLMAAWKFAPALAAGNSVVLKPSEKSPLTAIRVAQLACDAGVPPGVFSVVPGGAEPGKALALHRDVDCIAFTGSTRTGQQIMACAAQSNLKRVWLELGGKSPNIVLRDCPDLDRAAQAAADAIFFNMGEVCTAGSRLLVHRDIKDAFVAKLVDASRRFAPGHPLDPSVTMGAIVDRTQLDRVMGYIGAGRDEGKLVTGGARVREETGGFYVEPTVFEVKPDAKIAREEIFGPVLSVIVFDEVDEAVRIANDTEYGLAAAVWSADLSTAHAVARRLRAGTVWVNCYGDGSDDMNFPFGGYKLSGNGRDKSLHALDKYTELKSTVVRL

SEQ ID NO: 10382 - protein, 467 aa, Thermoplasma acidophilum
MLYGVCRRKHLIIDGYLFSMIMEDQERTERYNEDALRYSEYFKGKIQTISKVPVRSLDDFSIWYTPGVAAVSRKIASDPDLSFELTGRWNSIAILTDGTRVLGLGNIGPEAAMPVMEGKALIFNYLGGVNAIPIPIRVQSKEEFVKVAKALEPSFGGINLEDIESPKCFFLLETLQNEMNIPVWHDDQLGTASITLAGVINSLRIVGKKIDQVKVVFNGAGAANIAAAYLFKAAGFKMKNMILVDSKGILHPEREDIDALMINNPWKYQLAIETNGERVKGDLSNAIEGADLLISAAKSGPDTIDSRIVKKMNNDAIVFVLANPIPEMWPQEAKENGARIVATGRGDFPNQINNSLVFPGVFRGVLDARAKGVNFDVMVAASYEIANFVEDPTEEKIVPTMEEWELYPRLASAVASKTVELGLARKSDSKEGFYRRAREIIESNRNIYSKLMDLGLIKRMPNGEHKN

SEQ ID NO: 10383 - protein, 183 aa, Escherichia coli K12
MKTLIVSTVLAFITFSAQAAAFQVTSNEIKTGEQLTTSHVFSGFGCEGGNTSPSLTWSGVPEGTKSFAVTVYDPDAPTGSGWWHWTVVNIPATVTYLPVDAGRRDGTKLPTGAVQGRNDFGYAGFGGACPPKGDKPHHYQFKVWALKTEKIPVDSNSSGALVGYMLNANKIATAEITPVYEIK

SEQ ID NO: 10384 - protein, 217 aa, Zea mays
MAATRASPVLLLLLLTVQLSLLFRLPDSPSTLALALALAAEPDQQNAKQHRQPALLVQSTCNSTSFYDLCIAALAADPASSTADVPGLGGIAVSAAANNASGTAAFLGNASDAAATPQADRALLRACAGKYAAARDALVQARASLAEQAYDYAFVHVSAAGEYPAVCRTLFRRRQQQQRGASRTAYPAELAKREEALRRLCTIALDIISLLQNQETY

SEQ ID NO: 10385 - protein, 298 aa, Triticum aestivum
  misc_feature (261)..(261): Xaa can be any naturally occurring amino acid
MKTLLILTILAMATTIATANMQVDPSSRVQWPQEQPPPQSQQPFSQQPQQIFPQPQQTFPHQPQQAFLQPQQTFPRRPQQQFPQPQQPQQPFPQPQQPQLPFPQQPQQPFPQPQQPQQPFPQSQQPQQPFPQPQQQFPQPQQPQQSFPQQQQWMIQSFLQQQMNPCKNFLLQQCNPVSLVSSLVSIILPRSDCQLMQQQCCQQLAQIPQQLQCAAIHNVAHSIIMQQEQQRGVQILRPLFQLAQGLGIIQPQQPAQLEGIXRSLVLKTLPTMCNVYVPPDCSTINMPYANIDAVIGGQ

SEQ ID NO: 10386 - protein, 435 aa, Arabidopsis thaliana
MERYKILEELGDGTCGSVYKAVNLETYEVVAVKKMKRKFYYWEECVNLREVKALRKLNHPHIIKLKEIVREHNELFFIFECMDHNLYHIMKERERPFSEGEIRSFMSQMLQGLAHMHKNGYFHRDLKPENLLVTNNILKIADFGLAREVASMPPYTEYVSTRWYRAPEVLLQSSLYTPAVDMWAVGAILAELYALTPLFPGESEIDQLYKICCVLGKPDWTTFPEAKSISRIMSISHTEFPQTRIADLLPNAAPEAIDLINRLCSWDPLKRPTADEALNHPFFSMATQASYPIHDLELRLDNMAALPNLELNLWDFNREPEECFLGLTLAVKPSAPKLEMLRNVSQDMSENFLFCPGVNNDREPSVFWSLLSPDENGLHAPVESSPLSLSFSPMQQHTVGPPQSSGFTMTSSMQPNMLDRPWMAVSAPFQQSHYL

SEQ ID NO: 10387 - protein, 136 aa, Pyrobaculum aerophilum
  misc_feature (4)..(4): Xaa can be any naturally occurring amino acid
  misc_feature (91)..(91): Xaa can be any naturally occurring amino acid
  misc_feature (93)..(93): Xaa can be any naturally occurring amino acid
  misc_feature (103)..(103): Xaa can be any naturally occurring amino acid
KWVXSTKYVEAGELKEGSYVVIDGEPCRVVEIEKSKTGKHGSAKARIVAVGVFDGGKRTLSLPVDAQVEVPIIEKFTAQILSVSGDVIQLXDXRDYKTIEVPXKYVEEEAKGRLAPGAEVEVWQILDRYKIIRVKG

SEQ ID NO: 10388 - protein, 296 aa, Bacillus cereus ATCC 10987
MVIQWFPGHMAKARRQVTEKLKLIDVVIELVDARLPLSSRNPMIDEIITHKPRLVVLNKADMADDRLTKQWIAYFKEKGHMAISINAQAGQGMKEIAAACKVLVKEKFDKMVAKGIRPRAIRALIVGIPNVGKSTLINKLAKKNIAKTGDRPGVTTAQQWIKVGKEMELLDTPGILWPKFEDQLVGLRLATTGAIKDSILNLQDVAVYALRFMEKHYPDRLKERYNLNDIPEDIVELFDAIGKNRGCLMGGGMIDYDKTSELILRELRGGKLGKMTFETPEEFAEQTEDAEKVEEV

SEQ ID NO: 10389 - protein, 282 aa, Zymomonas mobilis
MMSPISIPSIRLNDGNDLPAVGFGTYKLNGSAGVSDIVSAIKVGYRLLDSAFNYENEGAVGEVFREAGIARDKLRIVSKLPGRHHHFEEAIATVEESLYRAQLDYYDLYLIHWPNPSKDLYVEAWQALIEARKKGLIRSIGVCNFLPEHLERLIKETGVTPVVNQVELHPYFPQEEQRAWDKAHGIVTESWSPLGRASKLLQDDTIKKIADRLGKSIPQVILRWHVQLGAIPIPKASSKERQIENLSLFDFELSPQDVEIIATLARPDGRLADQDPARYEEF

SEQ ID NO: 10390 - protein, 486 aa, Xylella fastidiosa 9a5c
MMHHNVHQSEILADPCDLQRAERWLQRDLRVLWHPCTQMREHPDTLPLVPIVRGEGAWLVGHDGRRYLDAVSSWWTNLFGHADPRISAAIAAQARTLEQVMLAGFSHEPAVRLAEALLRLAPRQDGREPLSKVFYADNGSAGVEVALKMAFHYFRNRGEEQRTRFIALHNGYHGETIGALAVGDIPLYRRVYAPLLTEVLFAPSPDAYLAEPGQSAAEYALQAAEALEVLFKRYSGQICALILEPLLQCAGGMRMHHPVYLHRVRELCDAHGALLICDEIATGFGRTGTLFACEQACPVILTDTDDKQLGIMPDLLCLSKGLTGGFLPLAAVLTTQQLYEEFLDDSRERAFLHSHSYTGNPLACIAALTTLDIFENDCIIERNQVTAARMTQLAASLSGHPHVADVRQAGMVVAFELTRDGNKRTPFPLQARLGLHVYRAALARGVILRPLGDVVYWMPPYCVDEEQLHLLAETTRVAIDEAIACV

SEQ ID NO: 10391 - protein, 153 aa, Zea mays
  misc_feature (136)..(136): Xaa can be any naturally occurring amino acid
  misc_feature (149)..(149): Xaa can be any naturally occurring amino acid
MASDRVLGTVKWFNGTKGFGFITPDDGSEDLFVHQSSIKSDGYRSLNDGDAVEYTVGSGNDGRAKALDVTAPGGGPLAGGERPDGGNGGGRGGYGGGDRGYGGGGDRGYGGGGDRGYGGGDRGYGGGGDRGYGGDXGYGGGGCFKCGEXGHMA

SEQ ID NO: 10392 - protein, 174 aa, Triticum aestivum
  misc_feature (23)..(23): Xaa can be any naturally occurring amino acid
MAPTVMASSATSGTPFQGLKSTXAGLPISRRSSSAGLSSVSNGGRIRCMQVWPIEGIKKFETLSYLPPLSTEALLKQVDYLIRSKWVPCLEFSKVGFVFREHNSCHGYYDGRYWTMWKLPMVWCTDATQVLNEVEEVKKEYPDAYVRVISIDNLRQVQCVSFIAFMPPGCEESG

SEQ ID NO: 10393 - protein, 347 aa, Flaveria linearis
YIGLRQRRASGKEYAELMNEFMSAVKQNYGEKVLIQFEDFANHNAFDLLEKYRTTHLVFNDDIQGTASVVLAGLISALKLVGGSLADHKFLFLGAGEAGTGIAELIALEISKQTNAPLEETRKKIWLVDSKGLIVRSRLDSLQHFKKPWAHDHEPVNKFLDAVKAIKPTVLIGSSGAGQTFTKEVVEAMRSFNEKPIILALSNPTSQSECTAEQAYTWSEGRTIFASGSPFAPVEYNGKVYVSGQSNNAYIFPGFGLGLIISGAIRVHDEMLLAASEALAEQVTQEHFDNGLIYPPFTNIRKISAHIAAKVAAKAYELGLASRLPQPENLVAYAESCMYSPKYRNYR

SEQ ID NO: 10394 - protein, 391 aa, Aspergillus nidulans FGSC A4
MSSTLEIATDNENMPLMKALQFHGPRDVRVEQIEEPVCGKGQVKLRNTYCGICGSDLHEYTSGPVLIPKGAHSITKATAPVVMGHEFGGVVEEVGEGITHLKPGQKAVVRPTIFDRKCPPCKIGYEYCCENIGFIGLSGMLFFRIKQAVRSGQANVPMRTGYGGGFAEKIVAPAEHFYPIPDNVTPESMAMIEPLAVAWHAVNLSPFKEGDNVLVVGGGPLGLCILQVLKMRGANFTIIAELTETRKKSAKYFGATHILDPREVDIPDNVRGLTDGVGADVVFDTAGVEKALDGAIGACRVHGTIVNVAVWEKKPQIKVNEMMYHEVKYLGSALYDEKSFQDTIDAISKGLLKPESMITDKIKLEDVVEKGFKTLLQDRNTHCKILVDPQI

SEQ ID NO: 10395 - protein, 381 aa, Prochlorococcus marinus subsp. pastoris str. CCMP1986
MDTHKLILKPGLEGVPVTNSSICDIDGQKGKLLYRGYSIEELAQKSSFLETAFLLIWGELPSATELRDFEQEVQMHRRLSFRVRDMMKCFPATGHPMDALQSSAASLGLFYSRRAIDDPKYIYNAVIRLIAKIPTMIAAFQLIRKGQDPIQPRDDLSYSSNFLYMLTEKEQDPIAAKVFDRCLILHAEHSLNASTFSARVTASTLTDPYAVIASAVGTLAGPLHGGANEDVIAMLEDIKTPEKAASFLEDAIQNKSKIMGFGHREYKVKDPRAIILQKLAEELFVRFGKDEMYEVAKKLELEAIPRLGGKGIFPNVDFYSGLVYRKLGIPRDLFTPIFAISRVAGWLAHWREQLGANRIFRPSQIYTGSAPRDWITLENRK

SEQ ID NO: 10396 - protein, 340 aa, Erwinia carotovora subsp. atroseptica SCRI1043
MSTMNTLICQEPKKLVWKKREIPIPGEGEALIKIKSVGICGTDIHAWGGNQPFFSYPRVLGHEICGEVVDTGKNVDRFKKGQQVTVIPYVACQQCPACKSGRTNCCEKISVIGVHQDGGFSEYLAVPTTNLLLAEGIDPQAAALIEPYAISAHAVRRAKVLQGEQVLVVGAGPIGLGAAAIAKAEGAHVVVADTSAARREHVIAHLGLSVVDPSAEDFEAQLRAEFGGSLAEKVIDATGNQHAMNNTINLIRHGGSIVFVGLFKGDLQFSDPEFHKKETTMMGSRNATPEDFAKVGHLMSEGKLTAEMMLTHRYPFSTLADIYERDVINNRELIKGVITF

SEQ ID NO: 10397 - protein, 313 aa, Glycine max
MASSLASSSTVLWILFLTIATLHLSSARKLSGSDPQLQFQYHRGPLLKGKISVNLIWYGKFKPSQKAIVADFITSLSSPKPVTAQPSVATWWKATDKYYKNSSPKLALSLGTTQILDENYSLGKSLTNNQILKLASKGPQRNAINIVLTSADVAVEGFCSSRCGTHGSSVGARVNGKRYKLAYIWVGNSETQCPGQCAWPFHQPIYGPQNPPLVAPNNDVGLDGMLINVASLLAGTVTNPFGNGYFQGPKEAPLEAGSACTGVYGKGAYPGYAGNLLLDPTTGASYNANGVNGRKYLLPALVDPETSACSTLV

SEQ ID NO: 10398 - protein, 299 aa, Glycine max
  misc_feature (24)..(24): Xaa can be any naturally occurring amino acid
  misc_feature (108)..(108): Xaa can be any naturally occurring amino acid
  misc_feature (227)..(227): Xaa can be any naturally occurring amino acid
MAATTLVFEGTLPSSGGDQKRAVXGLNTYPKATIAVTTKDAVLEAIKQGYRHLYAASAYGEEQSVGEAISEALKQGLIASRDQLFITTKLWVTDNHAHTMTSALQNSXCRTLQLEYIDLFLIHWPIATKPGKVVYPIEVSEIVEFDMKGVWGSMEECQRLGLTKAIGVSNFSIKKLEKLLSFATIPPAVNQVEVNLGWQQQKLRDFCKEKGITVIFVSPLFSCSKNXNQFFLQICLRWLYEQGLTFVVKSYDKERMKQNLGIFDWSLTEDDYKKISEIHQERLIKGPTKPLLDDLWDEE

SEQ ID NO: 10399 - protein, 669 aa, Triticum aestivum
  misc_feature (458)..(458): Xaa can be any naturally occurring amino acid
  misc_feature (473)..(473): Xaa can be any naturally occurring amino acid
  misc_feature (480)..(480): Xaa can be any naturally occurring amino acid
  misc_feature (502)..(502): Xaa can be any naturally occurring amino acid
  misc_feature (549)..(549): Xaa can be any naturally occurring amino acid
  misc_feature (586)..(586): Xaa can be any naturally occurring amino acid
  misc_feature (612)..(612): Xaa can be any naturally occurring amino acid
  misc_feature (618)..(618): Xaa can be any naturally occurring amino acid
MNADYGAPTELAGPLQQRRALYQPRLPPCLQGATVRVEYGDATTTIDPTGAHAVAQAFPRTYGQRLVTFLAPDDTAGAGKAVNERPPIRVGVVFSGRQSPGGHNVVWGLHDALKVYNPQSILYGFIGGTEGLFANKTLEITNDVLASYKNQGGFDLLGRSIDQIRSSKQVSAAMTTCQDLNLDGLVIVGGVTSNSDAAQLAETLVQKNCKTKVVGVPVSLNGDLKNQFVETTVGFDTVCKVNSQLISNVCLDAISAGKYYYFVRLMGRKASHVALECALQSHPNMLIMGEEVALSKLTLMEVINKICDGVQARAELGKHHGVLLIPEGLIESIPEMYALIQEISILHNNNVPVTEIPTQVSPWAAALFQFLPPFIRRELLLHQESDNSAQLSQIDTEQLLAHLVEAEMIKRTKEGRYKGKKFSSVCHFFGYQARGSLPSNFDCDYAYVLGHISLHMIXAGLTGYMATVANLKXPIHKWRXSCCPITAMMSVRRLLRGPGPFXYGKPAIHPSPIDLKGKAYELLREKASSFLLDDFYRTPGGIQFEGPGXDAKPITLTIEDQDYMGDIEMLKLYLDKVKTIVNPVAXRDTLKSGDNSMISMTHVLTVMSQPSXMLTALXHFLSLEHQRIIYNWFLDTRFRFPFPKLNTHPICQQTWEYILIPGFLYFVQR

SEQ ID NO: 10400 - protein, 325 aa, Triticum aestivum
  misc_feature (130)..(130): Xaa can be any naturally occurring amino acid
MAWWAGSMGGLDLRNHLAQFGGPAAGGAAMGGAEQAPTTPNSSGSNNHDDSSGAAQDSPTAGAGDNSPNPNAAISGSGPSGGGGGSGGGGSSSGRRPRGRPAGSKNKPKPPIIITRESPNTLRSHVLEIXSGADIMEAVSTFARRRQRGVSVLSGSGVVGNVTLRQPAAPPGSVVTLHGRFEILSLSGAFLPSPCPPGATGLAVYLAGGQGQVVGGTVIGELVASGPVMVVAATFSNATYERLPLADEEPGEAAAAATGSDGMQLPDGPAPGGNGGMGAAVGVPGLPDPSSMPFYNLPPNLQMPNGGGQMAHDVFGSFRPPPPAF

SEQ ID NO: 10401 - protein, 157 aa, Bacillus halodurans C-125
MSIHEFSARLINGEEKALSDYKDQVLLIVNTASKCGLTPQYEELQILYETYKDQGFTVLGFPSNQFMNQEPGDHNEIAAFCERNYGVSFPIFEKVKVNGKEAHPLFQYLTSQQGGLFTEKIKWNFTKFLIDRSGNVVKRYAPSTSPIKIKDDIEELL

SEQ ID NO: 10402 - protein, 205 aa, Triticum aestivum
MGERLKGTVKWFNVTKGFGFISPEDGSEDLFVHQSAIKADGYRSLNENDVVEFEVITGDDGRTKATDVTAPGGGALAGGSRPSEGGGDRGGRGGGGYGGGGYGGGGGGYGGGGGGYGGGGGSYGGGGGYGGGGGGGRYGGGSGGGRECYKCGEEGHISRDCPQGGGGGGGGYGGGGGRGGGGGGGGCFSCGESGHFSRECPNKTN

SEQ ID NO: 10403 - protein, 112 aa, Zea mays
  misc_feature (24)..(24): Xaa can be any naturally occurring amino acid
  misc_feature (40)..(40): Xaa can be any naturally occurring amino acid
  misc_feature (83)..(83): Xaa can be any naturally occurring amino acid
TYAYAYAYACKPLLQLTTHATRGXYLCMFLVGAYQEVPRXLHNLFGGPSVVRVSQCDWPHCFAVTPVPAGPYCADMLLAMHHXPEVMYEVLKQMTDCATVVVLARAFSAMPY

SEQ ID NO: 10404 - protein, 421 aa, Lotus corniculatus var. japonicus
MNHCVVLCIIVVGFFFFFFLSQFVMQIKREISIMKLVRHPYVVRLYEVLASRTKIYIILEFITGGELFDKIIRHGRLSEAESRRYFQQLIDGVDYCHSKGVYHRDLKPENLLLDSLGNIKISDFGLSALPEQGVSILRTTCGTPNYVAPEVLSHKGYNGAVADVWSCGVILYVLLVGYLPFDELDLTSLYSKIEKAEYSCPPGFPVGAKTLIHKILDPNPETRITIEQIRNDEWFQRGYVPVSLLEYEDVNLDDVNAVFDDAEEQRANQQCDHEDMGPLMLNAFDLIILSQGLNLAAIFDRGQDSMKYQTRFITQKPAKVVLSSMEVVAQSMGFKTHIRNYKMRVEGLSAKKTSHFSVMLEIFEVAPTFYMVDIQKAAGDAGEYLKFYKNFCGNLEDIIWKPPHESTKSKVSKTRSKRRSR

SEQ ID NO: 10405 - protein, 472 aa, Arabidopsis thaliana
MSTASVIIIGAGISGISAAKVLVENGVEDVLILEATDRIGGRIHKQNFGDVPVELGAGWIAGVGGKESNPVWELASRFNLRTCFSDYTNARFNIYDRSGKIFPTGIASDSYKKAVDSAILKLKSLEAQCSGQVAEEAPSSPKTPIELAIDFILHDFEMAEVEPISTYVDFGEREFLVADERGYECLLYKMAEEFLVTSHGNILDYRLKLNQVVREVQQSRNGVVVKTEDGSVYEANYVIVSASIGVLQSDLLSFQPLLPRWKTEAIQKCDVMVYTKIFLKFPQCFWPCGPGQEFFIYAHEQRGYFTFWQHMENAYPGSNILVVTLTNEQSKRVEAQSDQETMKEAMSVLRDMFGATIPYATDILVPRWWNNRFQRGSYSNYPMISDNQLLQNIKAPVGRIFFTGEHTSEKFSGYVHGGYLAGIDTSKSLLEEMKQSLLLQPLLAFTESLTLTHQKPNNSQIYTNVKFISGTS

SEQ ID NO: 10406 - protein, 211 aa, Zea mays
MACKPSPHFLSPHPHSQSRMPRMMCRVALAAVLLCAAAAAALGGKRAPIPDDLRDVIDDEEDDEWRRYGAPPSRGPGRGDGPPPDLSRMDPAALQDELLRGQTGPSFGFVKLRPGTARSQEDVVGIATRWSNVLRTGSVDAKFVAVNFGTLMFTMERGRDILELKEFILSQDEAYEFKVGDRVFRRPGDPPLDQVLDKPQKKKRHKSRDEL

SEQ ID NO: 10407 - protein, 366 aa, Pseudomonas aeruginosa PAO1
MSKMMKAAVFIQPGRIELVDKPIPDVGPNDALVRITTTTLCGTDVHILKGEYPVAPGLTVGHEPVGIIEKLGSAVVGYREGQRVIAGAICPNFNSYAAQDGVPSQDGSYLVESGRCACHGYKATAGWRFGNLIDGTQAEYVLVPDAQANLAPIPDGLSDEQVLMCPDIMSTGFKGAENANIRIGDSVAIFAQGPIGLCATAGARLLGASTIIAIDGNAHRLDIARGMGADVTLNFRECDVIEEILKLTGGRGVDASIEALGTQSTFETALRVLKPGGTLSSLGVYSEDLTIPLSAFAAGLGDHRINTALCPGGKERMRRLLNIVASGRVNLGPLVSHEYRLDDIVAAYDLFANQRDNVLKVAIKPH

SEQ ID NO: 10408 - protein, 365 aa, Lotus corniculatus var. japonicus
MVEQIKREISIMKIVRHPNIVRLHEVLSSQTKIYIILEFVMGGELYDRIVQRGKLSEDESRRYFQQLIDAVAHCHKKGVYHRDLKPENLLLDAFGNLKVSDFGLSALTKQGVDLLHTTCGTPSYVAPEVLSNQGYDGAAADVWSCGVILYVLKAGYLPFEEADLSTLYRRRVKIGEIRKDPWFQRNYLPLKLNEDEQVNLDDVQAVFDDIEDQYVPVQSEITEGGPLVMNAFEMITLSQGLNLSPLFDRHQDYVKRQTRFVSRKPAKVIISSIKVVAESMGLKLQSRNYKMRIEGLSANKAGQFAVVLEVYEVAPCLYMVDVRKAAGDTLDYHKFYKNLCAKLENIIWRPTETMPDSGLLRQMTL

SEQ ID NO: 10409 - protein, 125 aa, Triticum aestivum
  misc_feature (69)..(69): Xaa can be any naturally occurring amino acid
  misc_feature (84)..(84): Xaa can be any naturally occurring amino acid
  misc_feature (91)..(91): Xaa can be any naturally occurring amino acid
  misc_feature (102)..(102): Xaa can be any naturally occurring amino acid
  misc_feature (108)..(108): Xaa can be any naturally occurring amino acid
MAPTVMASSATSVAPFQGLKSTAGLPVSRRSNGASLGSVSNGGRIRCMQVWPIEGIKKFETLSYLPPLXTEGLLKQVDYLIRSXKWVPCLXFNKVGFIFREXNASPGXYDGRVGNVGKLNVSGGT

SEQ ID NO: 10410 - protein, 275 aa, Dechloromonas aromatica RCB
MQTSPSTTLQQQDLSIAGPAGPLALRLYRPSLARVVLPVVLYFHGGGFVGGSLDDADAAAGFIAEHTPALVVAVDYALAPARPFPAAPEDAHAAALWTAAHAAELGGDPARLAVAGDDAGGNLAAALTLIARDRNGPAIAAQALVGPMLDPSMTRLGDGVRLNSDLSAATCASCYSQYLPQSRQRLHPYASPLASVRQAGLPPALIVTAECDVLHNEAEKYAAALIAAGVPTQVVRFAGVNHATLASHRPALAEIAHFLRRRLWDAEAPAHPLNL

SEQ ID NO: 10411 - protein, 162 aa, Triticum aestivum
  misc_feature (126)..(126): Xaa can be any naturally occurring amino acid
  misc_feature (145)..(145): Xaa can be any naturally occurring amino acid
MSDSEDHHFESKADAGASKTYPMQAGAIRKGGFLVIKNRPCKVVEVSTSKTGKHGHAKCHFVALDIFNGKKLEDIVPSSHNCDVPHVDRQDYQLIDITDDGYVSLLTESGNTKDDLKLPTDDVLLXQIKTGFADGKDLILSVMSXPMGEEQICAVKEIGGGK

SEQ ID NO: 10412 - protein, 188 aa, Glycine max
MADSDNDSGGAHNAGKGSEMSPREQDRFLPIANVSRIMKKALPANAKISKDAKETVQECVSEFISFITGEASDKCQREKRKTINGDDLLWAMTTLGFEDYVEPLKGYLQRFREMEGEKTVAARDKDAPPPTNATNSAYESPSYAAAPGGIMMHQGHVYGSAGFHQVAGGAIKGGPVYPGPGSNAGRPR

SEQ ID NO: 10413 - protein, 250 aa, Oryza sativa (japonica cultivar-group)
MAKNYPVVSAEYQEAVEKARQKLRALIAEKSCAPLMLRLAWHSAGTFDVSSKTGGPFGTMKTPAELSHAANAGLDIAVRMLEPIKEEIPTISYADFYQLAGVVAVEVSGGPAVPFHPGREDKPAPPPEGRLPDATKGSDHLRQVFGAQMGLSDQDIVALSGGHTLGRCHKERSGFEGPWTRNPLQFDNSYFTELLSGDKEGLLQLPSDKALLSDPAFRPLVEKYAADEKAFFEDYKEAHLKLSELGFADA

SEQ ID NO: 10414 - protein, 183 aa, Shigella flexneri 2a str. 301
MKKLIVSSVLAFITFSAQAAAFQVTSNEIKTGEQLTTSHVFSGFGCEGGNTSPSLTWSGAPEGTKSFAVTVYDPDAPTGSGWWHWTVANIPATVTYLPTDAGRRDGTKLPTGAVQGRNDFGYAGFGGACPPKGDKPHHYQFKVWALKTDKIPVDSNSSGALVGYMLNANKIATAEITPVYEIK

SEQ ID NO: 10415 - protein, 487 aa, uncultured bacterium 561
MNIELTNPTLFRTEAYVNGEWIGADNGARLPVTNPATGALITDVAKTGAAETRRAIAAAETAMLSWRQKPAKQRAQVMRRWFDLIMANQEDLARIMTLEQGKTLAESRGEVAYGASYIEWFAEQAKRIDGDVIPAPSGDKRIICIKQPVGVCAAITPWNFPNAMITRKAAPALAAGCTIVIKPASETPLSALALAELAHQAGIPPGVLNVLAGSSSDIGAELTSNPTVRKLSFTGSTPIGKMLEAQCVPTLKKTSMELGGNAPFIVFDDADIDSAVQGALISKYRNSGQTCVCSNRLLVQAGIAEEFTAKLVAATESLKLGNGLDENVDLGPLVNAKAVNDVHELVQGSISAGAKLVLGGAPSNLGVCFYQPTILTGVRPEMPVFRNEIFGPVAPIISFETEAEAIELANDTEFGLASYFYTRDIGRVWRVAEALEYGIVGINEGIISNEMAPFGGVKESGSGREGSKYGIDDYLEIKYMLMGGLNQ

SEQ ID NO: 10416 - protein, 189 aa, Pseudomonas fluorescens PfO-1
MPDMLKRWCAVPALLMALTGLAQAADCPDLLQGSLPKLRAKESIDLCQRYADKPLVVINTASFCGFAPQFEGLEALNQRYKAQGLEMLGVPSNDFKQESKDSAETAKVCYANYGVTFTMTEPQKVRGDDATHLFQVLARQSSAPKWNFYKYVIDRQGKVIANFSSLTKPDDPEFLAAIEKAIASQSLKP

SEQ ID NO: 10417 - protein, 426 aa, Rubrobacter xylanophilus DSM 9941
MLDGKEQVAEIEREWGSERWEGIERPYAAEDVYRLRGSVRIEHTLARMGAERLWRLIHERPFVRALGALTGNQAVQQVKAGLEAIYVSGWQVAADANLANHTYPDQSLYPANSAPNLVRRINQALQRADQIHHAEGKNGVYWFAPIVADAEAGFGGALNVFEITKAMIEAGAAGVHFEDQLASEKKCGHMGGKVLLPTAQAIRNLIAARLAADVMGVPTVLIARTDGDAANLLTSDVDPADEPFLTGERTVEGFYRVKPGLEQAIARGLAYAPYADMVWCETSTPDLGEAREFAEAIHERFPGKPLAYNCSPSFNWKRYLSPEEMLTFQEKLGEMGYKFQFVTLAGFHSLNYSMFELSRQYGERGMAAYSELQEAEFAAEKHGYTATKHQREVGAGYFDEVAQVVAGGMASTTALTGSTEEAQFND

SEQ ID NO: 10418 - protein, 414 aa, Sulfolobus tokodaii str. 7
MAISLAKKYQGKLEIMPKIPIRSYEDFALIYTPGVAELVKEIQKDENQSFELTSRWNTIAILTDGSRVLGLGNVGPIASLPVMEGKALLFKFLGGVDAFPLPIKVSDKEEFIQVAKAIEPAFGGINLEDIESPKCFFILEELQKTLNIPVWHDDQQGTAGAVLAGLINAIKITGKDKNSKIVLMGAGAANIATAQLLIKYGFNPKNMILIDKEGPLYAERGDVDSLMFKHPWKYELAIQTNSERVKTIEEAFKGADILIAASSPEVRIDKKLIRMMNKPIVFALANPIPEIYPNEAKEAGAVIVATGRSDFPNQVNNSLIFPAVFRGVLDSRAKKITDEMIIAAAEELAKYAEEKGLREDYIIPRMDEIEVYYRMAAAVATKAVELGYARLKLSYREFLESAKERILRARRLSL

SEQ ID NO: 10419 - protein, 146 aa, Mesembryanthemum crystallinum
SVWRAINKQTGEVVAIKKMKKKYYSWEECINLREVKSLRKMSHPNIVKLKEVIREHDILHFVFEYMECNLYQLMKDRGRPFSEVEVRNWCFQVFQGLAYMHQRGYFHRDLKPENLLVSKDLIKVADFGLAREISSAPPYTEYVSTR

SEQ ID NO: 10420 - protein, 454 aa, uncultured bacterium 561
MLLGQAMTAMIYPTTNPAATEVMVVSRGEGPYIYDQAGKQYLEGMAGLWCTSLGYGNQEIIETATRQMEQLSFSHMFSGKTHPSAIELADKLAAMAPIDDARVFLGASGSDANDTLVKLIRYYAVASGQPDRVKIIARDKGYHGVSVASAALTGLHANHAHFQLPFDALGVLRTGAPHYYRCAEAGETEADFVARRASELEALILDEGPDTIAAMIAEPVNGAGGVIIPPEGYFEAVQAVLDKYGIMLWDDEVICGFGRLGAAFGAEKLNMKPRMMACAKALTSAYVPLSAAIVAGDIADAIAGPAADMGVFGHGYTYSGHPLGCAVASKVLDIYVRDRLFEHAATLGAYMSKRLDEFSDHPLVGEVSAMGLLGALELVANKDSKQPFEGMRVAQFCAKAAEDNGLIIRPLGGNRMALCPPLIIQEAHVDEIMDKLSRALDSTLDFVTAEGLTV

SEQ ID NO: 10421 - protein, 344 aa, Brassica napus
  misc_feature (330)..(330): Xaa can be any naturally occurring amino acid
RPTRPRTRRPTRPRDRIGGRVHTDYSFGFPVDLGASWLHGVCKENPLAPVIGRLGLPLYRTSGDNSVLYDHDLESYALFDMDGNQVPQELVTNVGITFEQILEEINKVRDEQDADMSISQAFSIVFSRKPELRLEGLAHNVLQWYLCRMEGWFAADADTISAKCWDQEELLPGGHGLMVRGYRPVINTLAKGLDIRLNHRVTKIVRQYNGVKVTTEDGQTFVADAAVIAVPLGVLKSGTITFEPKLPEWKQEAINDLGVGIENKIILHFEKVFWPKVEFLGVVAETSYGCSYFLNLHKATGHPVLVYMPAGQLAKDIEKMSDEAAANFAXVLQLQRILPDALLR

SEQ ID NO: 10422 - protein, 247 aa, Zea mays
  misc_feature (94)..(94): Xaa can be any naturally occurring amino acid
  misc_feature (208)..(208): Xaa can be any naturally occurring amino acid
  misc_feature (224)..(224): Xaa can be any naturally occurring amino acid
ATNSNARGSGAEMQGGATAKLQSPVTVMRPVRGDLEEHLPKPYLARALVAPDIYHPDGTAADEHGHHHMSVLQQHVAFFDRDDNGIIYPWETYXGCRALGFNMILSLLIALVVNGTMSYATLPGWLPSPLFPIYVHNIHKSKHGSDSGTYDNEGRFMPVNFENLFSKYARTSPDRLTYRELWSMTEGFRDAFDLYGWIAAKLEWTILXYVLARDDEGYLSREAXGRVYDGSLFEYVERQRAQHAKMS

SEQ ID NO: 10423 - protein, 352 aa, Haemophilus somnus 2336
MSINFVKEGNIMSKYVRSVCLVEPKKVDIKTVLYPKKGECDVLIKVESIGICGSDIGAFRGTNPLVTYPRILGHEIVGTVIEAGVGMPKNINIGDRVILEPYIYCGHCYPCSISRTNCCEALKVLGVHIDGAMQEIVRHPAHMLIKAPDIPIHELALAEPLTISLHAIRRTKVKAGEHVAIIGAGAIGLMAALVAKAYGATPILIDILDKRLDYAKSIGIPNIINPAKENDLEAIKSITNGRMAEVVIEASGANIAVQNTLKYTSFAGRIALTGWPKNETPLPTNLITFKELNIYGARTSKGEFEEALKLLESRKIEPKNIISKVITFDEIPHYIEELSENPDDYLKIIAVF

SEQ ID NO: 10424 - protein, 375 aa, Haloarcula marismortui ATCC 43049
MSGFVFNEKPIQIERGDGAYVYDDSGTEYLDMGASYACVPLGHKHPAVHSAVSEQLEKITYVQASYPNAERTALYDLLAKTAPDPIDKTWLCNSGTEANEAALKFARSATGNSKIVATMQGFHGRTMGALATTWKNKYKKPYEPLIGDVEFVPYDDSEALEEAVDEDTAAFIVEPVQGEGGINPTSDGYLEDAREITEDAGAALIFDEVQTGMGRTGALWNSQRAAVAPDMITAAKGLGNGLPIGATLCRDWIAEDYGSHASTFSGGPVISAAAGATVSTIIEDSVPGNAAVIGDYLLTELEAAIGDDVRDIRGEGLMIGVEVGRGANAALKKLALNHQVLALPAGRTVIRLLPPLTIDKDHADAVVDAMAEVVE

SEQ ID NO: 10425 - protein, 308 aa, Pseudomonas fluorescens PfO-1
MTSKLEQLKQFTTVVADTGDFEAIARVKPVDATTNPSLLLKAAAIPAYAELLNASVRDCKGDVGLASDRFGVAVGQEILKVIPGRISTEVDARLSFDQDAVLKRAHRLIELYDKAGVGRDRVLIKIASTWEGIRAAEILEKEGIQTNLTLLFSFAQAAACADAGVFLISPFVGRIYDWYKKANGNDYTGADDPGVQSVTRIYNYYKANDYKTVVMGASFRNLSQIEQLAGCDRLTISPDLIEKLAADTGKLERKLAPGHAGEARLSLNEAQFRWLSNEDAMATEKLAEGIRQFARDQEKLEALLQAKL

SEQ ID NO: 10426 - protein, 290 aa, Saccharomyces cerevisiae
TLVHVASVEKGRSYEDFQKVYNAIALKLREDDEYDNYIGYGPVLVRLAWHISGTWDKHDNTGGSYGGTYRFKKEFNDPSNAGLQNGFKFLEPIHKEFPWISSGDLFSLGGVTAVQEMQGPKIPWRCGRVDTPEDTTPDNGRLPDADKDAGYVRTFFQRLNMNDREVVALMGAHALGKTHLKNSGYEGGGANNVFTNEFYLNLLNEDWKLEKNDANNEQWDSKSGYMMLPTDYSLIQDPKYLSIVKEYANDQDKFFKDFSKAFEKLLENGITFPKDAPSPFIFKTLEEQGL

SEQ ID NO: 10427 - protein, 255 aa, Triticum aestivum
  misc_feature (141)..(141): Xaa can be any naturally occurring amino acid
SVGRLVMEASARSNLKPVSLELGGKSPLIVFDDADVDMAVGLAISANFFNKGEACVAASRVYLQEGIYDGFVKKLAQRMESWVVGDPFDPRVNQGPQVDKVQYERVLSYINHGKREGATVLTGGKPCGQSGYYIEPTVFTXDVKDDMIIAKEEIFGPVMCLMKFTSVEEAIARANDTRYGLAAGVVTKDINVANRMGRSIRPGVVWVNWYFAMDSDCPFGGRKMSGFGKDDGMHALDKFLAVKSVVTPVYDSPWL

SEQ ID NO: 10428 - protein, 289 aa, Saccharomyces cerevisiae
LVHVASVEKGRSYEDFQKVYNAIALKLREDDEYDNYIGYGPVLVRLAWHISGTWDKHDNTGGSYGGTYRFKKEFNDPSNAGLQNGFKFLEPIHKEFPWISSGDLFSLGGVTAVQEMQGPKIPWRCGRVDTPEDTTPDNGRLPDADKDAGYVRTFFQRLNMNDREVVALMGAHALGKTHLKNSGYEGGGANNVFTNEFYLNLLNEDWKLEKNDANNEQWDSKSGYMMLPTDYSLIQDPKYLSIVKEYANDQDKFFKDFSKAFEKLLENGITFPKDAPSPFIFKTLEEQGL

SEQ ID NO: 10429 - protein, 178 aa, Glycine max
  misc_feature (86)..(86): Xaa can be any naturally occurring amino acid
MAYSMISSPSVTTVNRACAGMAAPYTGLKFMAGFPTRMTNNDITCIASLCGILQCMQVWSPICKTNSETLSYLPDLDDSHSPEELXYLLRKGWIPCLQFELEHGFVYREHNRSPGYYDGRYWTMWKLPMFGCTDASQVLKELQEAKTAYPNGFIRIIGFDNVRQVQCISFIAYQLPGF

SEQ ID NO: 10430 - protein, 446 aa, Lotus corniculatus var. japonicus
MKKVRRRIGKYEVGRTIGEGTFAKVKFAKNSETGESVAIKIMDKTTILKHRMVEQIKREISIMKIVRHPNIVRLHEVLSSQTKIYIILEFVMGGELYDRIVQRGKLSEDESRRYFQQLIDAVAHCHKKGVYHRDLKPENLLLDAFGNLKVSDFGLSALTKQGVDLLHTTCGTPSYVAPEVLSNQGYDGAAADVWSCGVILYVLKAGYLPFEEADLSTLYRRTSAAEFVCPSWFSTGTTTLIHKILDPNPKTRVKIGEIRKDPWFQRNYLPLKLNEDEQVNLDDVQAVFDDIEDQYVPVQSEITEGGPLVMNAFEMITLSQGLNLSPLFDRHQDYVKRQTRFVSRKPAKVIISSIKVVAESMGLKLQSRNYKMRIEGLSANKAGQFAVVLEVYEVAPCLYMVDVRKAAGDTLDYHKFYKNLCAKLENIIWRPTETMPDSGLLRQMTL

SEQ ID NO: 10431 - protein, 442 aa, Streptomyces spectabilis
MSTTAMPASTHHTIALEQSHRLPGGQSMTDLSGLVVDRARNAEVWDKDGKRYIDFFTGVGVCNIGHSHPRFLAEVGEQLSACAVGTFYTDARSRYYELLAAQLPERLGRIHMFSTGSEAVEAAVKLARAATGKHEVVSFWGGFHGKTQGALSLHGGPRKHRSGPFPPGSHQVPYAYCYRCPLQLEHSTCGQRCVDLAEQSIENGSVGDIAAIIVEPVQGTNGNIIPPAGYLRAVRRLADRHGALLILDEVITGFGRTGSLFAFEQDPEVRPDVVVLGKAMASGVPASAIVSRAELVEGTSFGQPSAAASTFGGNPLASAAALATLRILLDERLPERSRLLGETVARRLASWKEEFPFVGNAANVGLMVGVELVEPGTRRPLPKDVTRRIFQGLLAEGVLAMAYDSRIRIYPPLSIPADHLDEGLTAFESVFRSLRSLRSTQT

SEQ ID NO: 10432 - protein, 355 aa, Lotus corniculatus var. japonicus
IVRLHEVLATKTKIYFIMDFVRGGELFAKVSKGRFGEDLSRRYFHQLISAVGYCHTRGVFHRDLKPENLLLDENGDLKVSDFGLSALRDQIRPDGLLHTLCGTPAYVAPEILAKRGYDGTKVDVWSCGVVLFVLAAGYLPFNDPNLMVMYRKIYNGEFRCPRWMSPDLRRFLSRLLDTNPETRITVDGMTRDPWFKKGYKEIKFHEEYRPESGSGSGSEVVDLNAFDIITFSSGLDLSRLFRQKEGEERLVVSGTPEKVLEMAEEVGAAEGMAVRWKKECGVELEGLNGDYGIGIDVSRLTAELAVVEVKMRGVDAVAFRNLWDEKLKPQLLGGATTSYHQEVEPESPESQVASD

SEQ ID NO: 10433 - protein, 254 aa, Triticum aestivum
MAAKCYPTVSDEYLAAVAKARRKLRGLIAEKNCAPLMLRLAWHSAGTFDVATKTGGPFGTMKCPAELAHGANAGLDIAVRLLEPIKEQFPILSYADFYQLAGVVAVEVTGGPEVPFHPGRQDKPEPPPEGRLPDATQGSDHLRQVFSTQMGLSDQDIVALSGGHTLGRCHKERSGFEGAWTANPLIFDNSYFTELLSGEKEGLLQLPTDKTLLTDPAFRPLVDKYAADEDAFFADYAEAHLKLSELGFGEAGCC

SEQ ID NO: 10434 - protein, 483 aa, Arabidopsis thaliana
MRRNVDNQSYYVLGHKTPNIRDLYTLSRKLGQGQFGTTYLCTDIATGVDYACKSISKRKLISKEDVEDVRREIQIMHHLAGHKNIVTIKGAYEDPLYVHIVIELCAGGELFDRIIHRGHYSERKAAELTKIIVGVVEPCHSLGVMHRDLKPENFLLVNKDDDFSLKAIDFGLSVFFKPGQIFKDVVGSPYYVAPEVLLKHYGPEADVWTAGVILYILLSGVPPFWAETQQGIFDAVLKGYIDFDTDPWPVISDSAKDLIRKMLCSSPSERLTAHEVLRHPWICENGVAPARALDPAVLSRLKQFSAMNKLKKMALKVIAESLSEEEIAGLRAMFEAMDTDNSGAITFDELKAGLRKYGSTLESTEIHDLMDAADVDNSGTIDYSEFIAATIHLNKLEREEHLVSAFQYFDKDGSGYITIDELQQSCIEHGMTDVFLEDIIKEVDQDNDGRIDYEEFVAMMQKGNAGVGRRTMKNSLNISMRDV

SEQ ID NO: 10435 - protein, 437 aa, Desulfuromonas acetoxidans
MSTLKEVLKQKIDAHRPRTTRLVKECGDTTLGEVTIAQAIGGARGIKCLVTDISYLDPMEGIRFRGMTIPETFAALPKVPGSDYPYVEGFWYLLLTGDVPTMEQTLEVVEDWKQRSQVPEYVIDVLRAMPRDSHPMAMFSAAIVAMQRDSVFASNYAAGKFNKMTCWEDMLEDSNDLMAKLGPIAAYIYRMKYKGDTHIAPDPELDMGGQFAHLIGQCDEYKDVARMYFILHSDHESGNVSAHTTHLVASALSDAYYSYAAGINGLAGPLHGLANQEVLAWTQNFMEKLGGKVPTKDELKAALWDTLNSGQVIPGYGHAVLRKTDPRYTSQREFCLNTPGLKEDPLFQLVAMIYEVAPDVLLEHGKAKNPWPNVDAQSGVIQWYYGLTEYDFYTVLFGVGRALGCLANITWDRALGYAIERPKSVTTAMLEDAAGIK

SEQ ID NO: 10436 - protein, 293 aa, Glycine max
MSNCLLTGYCLFRCSFLVYVAPIDTLFPKFKHYKFRHLPSTPTAARRRQKGAYFISLIITHTPTLIAMETGGFHGYRKLPNTTAGLKLSVSDMNMRQQVASSDHSAATGEENECTVREQDRFMPIANVIRIMRKILPPHAKISDDAKETIQECVSEYISFITGEANERCQREQRKTITAEDVLWAMSKLGFDDYIEPLTMYLHRYRELEGDRTSMRGEPLGKRTVEYATLGVATAFVPPPYHHHNGYFGAAMPMGTYVREAPPNTASSHHHHHHHHHHARGISNAHEPNARSI

SEQ ID NO: 10437 - protein, 260 aa, Triticum aestivum
  misc_feature (227)..(227): Xaa can be any naturally occurring amino acid
MAAGTGRVLPLLAVAAALAAALLYTAPFSKSLGGEGCSLLPHGHFWIASQRVVALGRVGPAAVEVKEGLINAIAVGDYRSFVLRRPLVDYGDAVIMPGLIDVHAHLDEPGRAEWEGFSTGTRAAAAGGITTLVDMPLNSFPSTVSEETLKLKVDAARDKLYVDVGFWGGLVPENALNPSKLESLLNAGVLGLKSFMCPSGINDFPMTNSTHIEEGLVTLAKYKRPLXLIHAERIPDVVSDEELDGYLKSRSYATYLKFRT

SEQ ID NO: 10438 - protein, 437 aa, Desulfuromonas palmitatis
MSTLKETLRKKIEEHRPRTTRLVKEFGDVKLGDVTISQAIGGARGIKCLVTDISYLDPMEGIRFRGKTIPETFAALPKVPGSDYPYVEGFWWMLLTGDVPTMEQTLEVVEDWKKRSQIPAYVIDVLRALPRDSHPMAMFSAAIVAMQRDSVFAKNYAAGKFNKMTCWEDMYEDANELMAKLGPIAAYIYRMKYKGDTHIPADPKLDMGGNFAHMMGVDKPYDDVARMYFILHSDHESGNVSAHTTHLVASALSDAYYSYAAGINGLAGPLHGLANQEVLAWTQNFMDKLGGKVPTKEELEKALWDTLNSGQVIPGYGHAVLRKTDPRYTSQREFCLKTPGLKEYPLFQLVSMIFEVAPDVLLKHGKAKNPWPNVDAQSGVIQWYYGVTEYDFYTVLFGVGRALGCLANITWDRALGYAIERPKSVTTAMLEDAAGIK

SEQ ID NO: 10439 - protein, 618 aa, Zea mays
MISPAMCRSAPRRAAQVRRLLSSAAPPAHAGAAVPGPCIVHKRGNDILHDPWYNKDTAFPMTERDRLGLRGLLPPRVMSFEQQYERFINSFRSLEHNTRGEPDSIVALAKWRILNRLHDRNETLYYRLLIDNIKDFAPIIYTPTVGLVCENYSGLFRRPRGMYFSAKDKGEMMSMIHNWPAEKVDMIVVTDGSRILGLGDLGVQGIGIPIGKLDVYVAAAGINPQKVLPIMLDVGTNNEKLLEDKLYLGLRQPRLEGEEYLAVVDEFMEAVHARWPKAVVQFEDFQMKWAFETLQRYRNRFCMFNDDVQGTAGVALAGLLGAVRAQGRPLQDFTNQKIVVVGAGSAGIGVLSMAKQAMLRMPGIHRTGEGHNQFWVLDKDGLITKARKDLDSAVARFARGFGPDEVPDLYEGASLVEVVKKVKPHVLLGLSGVGGIFNEEVLKAMKESDSPRPAVFAMSNPTTKAECTPDDVFKHVGDKAIFASGSPFSNVSLGNGKSGYANQANNMYLFPGIGLGALLSGARHVSDGMLQAAAECLASYITDDEIRKGILFPSVSSIRHITARVGAAVVRAAVAEDLAEGCCDVGPRELGSMSESEAVDYVARKMWYPIYSPLVSDK

SEQ ID NO: 10440 - protein, 326 aa, Archaeoglobus fulgidus DSM 4304
MKKIVVIPGDGIGKEVMEAAMLILEKLDLPFEYSYYDAGDEALEKYGKALPDETLEACRKSDAVLFGAAGETAADVIVRLRRELGTFANVRPAKAIEGIECLYPGLDIVVVRENTECLYMGFEFGFGDVTEAIRVITREASERIARYAFELAKREGRKKVTALHKANVMKKTCGLFRDVCREVAKDYPEIQYNDYYIDAACMYLVMDPFRFDVIVTTNMFGDIVSDLAAGLVGGLGLAPSANVGERTAIFEPVHGAAFDIAGKGIANPTAMILTACMMLRHFGYVEEAKKVEEAVEKTIKEGKKTPDLGGNLKTMEFANEVASLLD

SEQ ID NO: 10441 - protein, 497 aa, Glycine max
  misc_feature (396)..(396): Xaa can be any naturally occurring amino acid
MAALSNGHGSSFFKMPPIKFTKLFINGEFVDSLSGREFETRDPRTGEVITRIAEGAKEDVDVAVKAARAAFDYGPWPRMPGAERAKIMMKWADLVDQNIEEIAALDAIDAGKLYHWCKAVDIPAAASTIRYYAGAADKIHGEVLKASREFHAYTLLEPIGVVGHIIPWNFPSTMFVAKVSPSLAAGCTMVLKPAEQTPLSALFYAHLAKLAGIPDGVLNVVPGFGQTAGVAISLHMDIDKVSFTGSTEVGREVMRAAANSNLKPVSLELGGKSPVIVFDDADVDKAAELALLGILFNKGEICVAGSRVLVQEGIYDEFEKKLVEKAKAWVVGDPFDPKVQQGPQVDKFSSKSASAYKKTQTNGKKVLERGEIINYTRRQQVVEAKFKGQQFETNEXASPVMALMKFKTIEDAIKIANNTRYGLASGIVTKSLDTANTVSRSIRAGIVWINCYFAFGDDIPYGGYKMSGFGRDFGMEALHKYLQVKSVVTPIYNSPWL

SEQ ID NO: 10442 - protein, 338 aa, Triticum aestivum
  misc_feature (322)..(322): Xaa can be any naturally occurring amino acid
  misc_feature (325)..(325): Xaa can be any naturally occurring amino acid
  misc_feature (337)..(337): Xaa can be any naturally occurring amino acid
MKTLFILTILAMATTIATANMQVDPSGQVQWPQQQPFPQPQQPFSQQPQQIFPQPQQTFPHQPQQAFPQPQQTFPHQPQQQFPQPQQPQQPFPQQPQQQFPQPQQPQQPFPQQPQQQFPQPQQPQQPFPQPQQPQLPFPQQPQQPFPQPQQPQQPFPQLQQPQQPLPQPQQPQQPFPQQQQPLIQPYLQQQMNPCKNYLLQQCNPVSLVSSLVSMILPRSDCKVMRQQCCQQLAQIPQQLQCAAIHGIVHSIIMQQEQQQQQQQQQQQQQQQGIQIMRPLFQLVQGQGIIQPQQPAQLEVIRSLVLGTLPTMCNVFGPPECXTTXAPFASIVADIGXQ

SEQ ID NO: 10443 - protein, 172 aa, Zea mays
MAGIGRNMVAPLLVLNLIMYIIVIGFASWNLNHFINGQTNYPGVAGNGATFYFLVFAILAGVVGAASKLAGVHHVRAWRHDSLATNAASSLIAWAITALAFGLACKEIHIGGHRGWRLRVLEAFAFVIILAFTQLLYVLMLHTGLFGGSGGYRDHDYGVGGAAGEPKGVTRV

SEQ ID NO: 10444 - protein, 1027 aa, Chlamydomonas reinhardtii
MGCAQSTPVDQPARQQPQATQQKSVEPAVVKKPVEPARVEPKVEVPSTKPSEVPHVEKAQSINRGQPGDGSGPLQQPSPAMPGAKQGGTKERRAAAGSEAVRDQIRKLAVGGPQAKEEKEKIYEVSDSEDEELEDDPSERTTLSGDWYKPQEVTDAILEALKRNFVFKGIPQNHLVEVVGRMYGISFKSGAVVLQQGALPKQDDCMYYLQQGEAEVVISGGADASKNHGEERKVDGHTVRIPQKPGWLFGDVALLFHSPRTASVVAKTNITVWAMDRRTFLKFVMKHAQGARALRFLRKLPLLKGLSDNDLIRAASRMPQRMYEDGQPLIRIGERGDELFLIRYGKVRVFRPDGNGGRVEVAVLGRGQFVGERAVINDKLRSADCVAQGQVQVVVLKKREFMDLDNPLLAWMLDYDAVSAVIRSLPQFKGLKQEQMENILDRFDAREELMQGDTILNQGDMLEKLYVVKIGEIALFRNDERVEDPNFVHEIAGFSYFGETAITQTGKCPYTIRVASESLHLLSLPKRQVDSFMGRDTGLKNEEAVVAALKKSKFLANMTDPEFKELLKACEQTDYNPGEVIAVANSSVTNKIFLVKSGEVMVVAADLALPDTGEVDVRKLTGSERQRLLAGSIFNDKALNSPETASLEASLVAGTPCGIITFTTSDVERVMGGRAMSRSRNAMPGAAAAVEERKFPRVKFTELEFHRIIGTGQFGLVRVVRNIKTNEVYALKVMHKAPIVESKQIEHVINERKILEEACTHPFCVRLCGAYQDKASLYLLQEWVPGGELFHHLDVEGAFDEPTAMFYAANVLLALEFLHAKGIVYRDLKPENLLLDTQGYIKMADFGFAKYIGGDKTYTICGTPDYQAPEVIMRRGTTKAADYWALGVLIFEMLVGDPPFKSLTGDPWDTFRRTLSGRFYVPNFISDQAADLIFKLLQVNPDKRLGSDKRLGAEEIKRHRWFSRIDWRALEQKKLPSPFRPRVRNPLDTSNFDNFDNVDLEPPPVPADRAEKHSQQWELWDWIDDSK

SEQ ID NO: 10445 - protein, 477 aa, uncultured bacterium 561
MREYKQFYIDGEWVAPSAPSDFEVFDPATEEVCATISLGNETDVDKAVAAAKAAFETFSQTSVEERVALLERICEIYQRRLGDIAEAIRLEMGAPIKLASTAQAFAGLGHIAEAAKVLKTYAFTEDLGEHRVVKEPIGVCGLITPWNWPLNQVSCKVAPAIAVGCTMILKPSEIAPLSSYIYAEILHEAGVPAGVFNLVNGDGPTVGTALSVHPDVDMMSFTGSTRAGSLVAQNAAPTVKRVTQELGGKSPNIILEDADLEAAVTRGVLHMYNNTGQSCNAPSRMLVPRDKLAAAEAIAAKVTETMVTIGDTADDKTTMGPVVSKVQWDKIQGLINKGIEEGAKVVCGGAGLPDGIDRGYYVRPTVFSEVNNNMTVAREEIFGPVLTMIPYDSEEEAIKIANDTPYGLAGYVQGENIDHARQVASKIRAGNIHLNGASGGMDVPFGGFKQSGNGREWGSHGFTDYLEIKAIEGYSAA

SEQ ID NO: 10446 - protein, 475 aa, Staphylococcus aureus subsp. aureus MSSA476
MRDYTKQYINGEWVESNSNETIEVINPATEEVIGKVAKGNKADVDKAVEAADNVYLEFRHTSVKERQALLDKIVKEYENRKDDIVQAITDELGAPLSLSERVHYQMGLNHFVAARDALDNYEFEERRGDDLVVKEAIGVSGLITPWNFPTNQTSLKLAAAFAAGSPVVLKPSEETPFAAVILAEIFDKVGVPKGVFNLVNGDGAGVGNPLSEHPKVRMMSFTGSGPTGSKIMEKAAKDFKKVSLELGGKSPYIVLDDVDIKEAAKATTGKVVNNTGQVCTAGTRVLVPKKIKDAFLAELKEQFSQVRVGNPREDGTQVGPIISKKQFDQVQNYINKGIEEGAELFYGGPGKPEGLEKGYFARPTIFINVDNQMTIAQEEIFGPVMSVITYNDLDEAIQIANDTKYGLAGYVIGKDKETLHKVARSIEAGTVEINEAGRKPDLPFGGYKQSGLGREWGDYGIEEFLEVKSIAGYFK

SEQ ID NO: 10447 - protein, 160 aa, Bacillus subtilis subsp. subtilis str. 168
MSIYHMKVRTITGKDMTLQPFAGKVLMIVNTASKCGFTSQLKQLQELYDTYQQEGLEILGFPCNQFMNQEPGEEADIQEFCETNYGVTFPMFSKVDVNGKNAHPLFVYLTEHAKGMLGTKAIKWNFTKFIVDRNGEIVGRYSPNTNPKELEDDIVKLLEQ

SEQ ID NO: 10448 - protein, 246 aa, Glycine max
MYKNKNKHTHPPQRYSHHFEELHNFVFLDMGSLALETEDVISDIYLSLGLKESDKGVGGPRVLSLLSSLLERSVQRNETLLEAKHVKDVVTVFHGLRAPTLSVRKYIDRIFKYSGCSPSCFVVAHIYVDRFIQHTEIKLTSLNVHRLLITSIMLAAKFIDDAFYNNAYYAKVGGVSTSELNRLEMSFLFGIDFRLQFSVDTFGRYCRQLEKEAAEVVQIERPMQACRIKESWSNKDDPTCASTIAR

SEQ ID NO: 10449 - protein, 468 aa, Triticum aestivum
SARAAGKRLWDAGVRDLLILEATGRVGGRMHKHNFGGLNVEIGANWVEGLNGDKVNPIWPMVNASLKLRNFYSDFDGVVGNVYKGGGGLRDEEFVQKRMDRGDAVEELGGKLAAEMDPSGRDDISILAMQRLFNHQPNGPATPVDMVLDYFRYDYEFAEPPRVTSLQGTEPTATFADFGDDANFVADQRGFETLIYHIAGQYLRSDKSGNIVDPRVKLNKVVREISYDQRGVVVTTEDNSAYSADYVIVSASIGVLQSDLIQFKPQLPAWKILAIYRFDMGVYTKIFLKFPRKFWPTGPGKQFFVYASSRRGYYGMWQSFEQEYPGANVLMVTVTDVESRRIEQQPDNVTMAEAVGVLRNMFPDRDVPDATDIYVPRWWSNRFFKGSYSNWPVGVNRYEYDQLRAPVGGRVYFTGEHTSEHYNGYVHGAYLAGLTPGTFMNRAPQGELQPPHLVLSSPGHAIELVCVI

SEQ ID NO: 10450 - protein, 275 aa, Picrophilus torridus DSM 9790
MRLIENWFSERYSDNLQLSFRVQDQLLSVKTDYQRIDLFNTYDFGKLLSIDGTVQLTEKDEYIYHEMITMVPYYCTAKSDSALIIGGGDGGAAKRLIDLGIKRIVNVEIDQNVVEISRKYFPELADSFNNKNVELIIGDGIKYVKDTDESFDLIIIDSTDPVGPAEGLFNKSFYENARARLSDDGIIVTQSGSPYYQPEALKMATKGMLDVFSNVRTYIAFIPTYPSGLWSFTMASKSEIMQRKDNIIPGRYFNEDVLKGSFYLPEFVKNIIKSI

SEQ ID NO: 10451 - protein, 131 aa, Prochlorococcus marinus str. MIT 9313
MSKKTDDILDSLKTLSLLEASELVKQIEDAFGVSAAASAGVVVAAGGAAGGGAAAEAAEEQTEFDVVLESFDASAKIKVLKAVREATGLGLGDAKAMVEAAPKTIKEGIAKNDAEALKKAIEEVGGKVSLK

SEQ ID NO: 10452 - protein, 437 aa, uncultured bacterium 561
MDRKTLEAHWMPYTGNRQFKKDPRIITSAEGVWYTDDKGRKVLDGHSGLWTSGLGHGRKEISAAVSQQINTLDFAPSFQFGHPPAFELADRIKGLMPEDLDYVFFTNSGSESADTSLKMARAYWRLMGQPTKTRFVGRMKGYHGVNFGGISVGGIAANRKFFGQGVEADHLRHTMLPQNRFCRGMPQDGAELADELNEMIALHDASTIAAVIVEPMAGSAGVIPPPVGYLQKLRDICDANDILLIFDEVITGFGRCGAMTGADAFGVVPDILNVAKQITNGAIPMGAVIARAGIYDTFMAHGGPDYALEFAHGYTYSAHPVACAAGLAALDVLTGEALPQRVADEAPFFEALLHDALSDKPHVSDVRNYGFAGAITLEPYPGEPLRRPFEVAMKMWEKGFLVRYGGDTIQLAPMFVMERPEMESLVGALADSLQELA

SEQ ID NO: 10453 - protein, 472 aa, Burkholderia cepacia R18194
MNLINGERVAGDGEAFPVVNPATGETVVTMRDASAEQVDAAVAAAAAAFPSWSATPPGARAARLLALADAIEERADEFAALESLNCGKPLHAVKADELPLTVDVFRFMAGAARCVSASSAGEYVAGFTSMIRRDAVGVVGSIAPWNYPLMMAAWKLAPALAAGCPVVLKPSELTPLTSLRVAELAAELFPRGVVNVVVGRGATTGDALINHRQLDLVSLTGGPATASRILEASSRKLMHTHMELGGKAPVIVFDDTNLDAAVEGIRNAAFFNAGQDCAQPCRLYVEDGIYDTFVANLANRVASIRLGAPDDTRTEMGPVISEGHRRRIAGFVDRARDLRHVEILTGGRDVAGGGYFYEPTIVAHARQDDEIVQREVFGPVISVTRFSGAEQAIHYANDSPYGLASSIWTRDVGKAMTVASRLRCGITWINAHGVATAEMPHGGMKASGYGSDMSVYALENYTTVRHVQIAHA

SEQ ID NO: 10454 - protein, 681 aa, Glycine max
MSGGGCSIVWFRRDLRVEDNPALAAGVRAGAVVCVFIWAPEEEGQYYPGRVSRWWLKQSLAHLDSYLRNLGSPLITKRSTNSISSLLEVVKSTGATQLFFNHLYDPLSLVRDHKAKEVLTAQGITVRSFNSDLLYEPWDVNDAHGQPFTTFSAFWERCLSMPYDPQAPLLPPKRIIPGDVSRCPSDTLVFEDELEKASNALLGRAWSPGWSNADKALTAFVNGALIEYSKNRRKADSATTSFLSPHLHFGEVSVKKVFHLVRIKQVFWANEGNKAGEESVNLFLKSIGLREYSRYISFNHPYSHERPLLGHLKFFPWVVNEGYFKAWRQGRTGYPLVDAGMRELWATGWLHDRIRVVVSSFFVKVLQLPWRWGMKYFWDTLLDADLESDALGWQYISGTLPDGREIDRIDNPQFEGYKCDPNGEYVRRWLPELARLPTEWIHHPWNAPESVLQAAGIELGSNYPLPIVGIDAAEVRLQEALIQMWQQEAASRAAMENGTEEGLGDSSESAPIAFPQDIQMEERPEPVRNNPPHGTRRYQDQMVPSITSSHVRVEEEETSSDLRNSAADSRAEVPINVTTQQNARETVNQGVLLNTNRNTRVQNNPTTWLRNAAEDSTAESSSSTRRERDGGVVPVWSPPASNFSEQFVDDENGIGTGSSYLQRQHPQSHQLMNWTRLPQTG

SEQ ID NO: 10455 - protein, 205 aa, Pyrobaculum aerophilum str. IM2
MARSGRYKVPFRRRREGLTNYRKRRKLLLSKKPRLVVRKTNKHIIAQIVVAKPQGDVTIVGADTRILAKFGWRGDENNVAAAYLLGLVVGYKARARRVEEAILDIGLHRPAPGARVFAVLKGALDAGLKIPHGEEVLPDEDRIKGKHVAEYAEKLKEENPEAYKARFSRYLQRGLEPEKLPEHFEEVKKKIVEYYEKKLAKVAAQ

SEQ ID NO: 10456 - protein, 406 aa, Burkholderia cepacia R18194
MGPDVIDIRKLYGQTGKFTYDPGFMSTAACNSAITYIDGDKGELLYRGYPIDNLAQNADFLESCYLLLKGELPNAAQKKEFVDTVTKHTMVHEQMHFFFRGFRRDAHPMAILVAAVGALSAFYHDSLDINDPRHREVSAIRMIAKLPTLVAMAYKYSIGQPFVYPKNSLSYSANFMHMMFSNPCEEYKVNDVLVRALDRILILHADHEQNASTSTVRLAGSSGANPFACIAAGIACLWGPAHGGANEAALNMLEQIGSPDNIPEFIKQVKDKNSGVKLMGFGHRVYKNYDPRAKLMRETCYEVLNELGLHDDPLFKLAMQLEKIALEDEYFVSRKLYPNVDFYSGIVQRALGIPTSMFTCIFAMARTVGWIAQWNEMIGDPEQKIGRPRQLFIGDTPREAKPLNAR

SEQ ID NO: 10457 - protein, 218 aa, Mesorhizobium loti MAFF303099
MKFFVDTADIKDIRELNDLGLLDGVTTNPSLILKSGGKIADVTKQICDIVQGPVSAEVVATEYKDMMAEAEVLAKIAPNVCIKVPLTLDGLKACKTIRTQMNRMVNVTLCFSANQALLAAKAGASFISPFVGRIDDTGSDGMELIQEIRQIYDNYDYQTEILTASVRTVNHVKQAALIGADVITAPPATLKALVNHPLTDKGLAAFLADWAKTGQKIG

SEQ ID NO: 10458 - protein, 196 aa, Physcomitrella patens
MSTSRFIKCVTVGDGAVGKTCMLISYTSNTFPTDYVPTVFDNFSANVVVDGNTVNLGLWDTAGQEDYNRLRPLSYRGADVFLLAFSLISKASYENISKKWIPELRHYAPSVPIILVGTKLDLRDDKQFFADHPGAAPITTSQGEELRKAIGAASYIECSSKTQQNVKAVFDAAIKVVLQPPKQKKKKKKQKNCVIL

SEQ ID NO: 10459 - protein, 137 aa, Glycine max
  misc_feature (77)..(77): Xaa can be any naturally occurring amino acid
  misc_feature (96)..(96): Xaa can be any naturally occurring amino acid
ARSMISFPAVTTVNRAGAGMVVPFTGLKPMAGSPTINTNNDITFIASRGGRVQCLHVCPPADKNNLETLSYLPDLDXAQSSKREEYLLTTGWLRCXGIRIKHGFVIREHTTLPGFYNGLLGTMWILPIDSCSHASNV

SEQ ID NO: 10460 - protein, 106 aa, Glycine max
  misc_feature (59)..(59): Xaa can be any naturally occurring amino acid
  misc_feature (62)..(62): Xaa can be any naturally occurring amino acid
AASQSGDSSLLPLLFRVEPMDIVGKAKEDASLPKATMTKIIKEMLPRGGRVDRDAQDLXTSXCVEVINLDWSEGNEVCRKEERRTIAPEHLLKASRALEFGEYIRE

SEQ ID NO: 10461 - protein, 300 aa, Geobacter bemidjiensis
RPFEALPKAAGSEYPTVESFWYFLLTGEVPTAAQVSAVEAEFKTRQVVPEYVYTAVRALPKESHPMVMLSVGIMAMQKDSKFAAFYSGGKFNKMDAWESVYEDASDIVARIPVLAAFIYNLKYRGDKQIAIDPKLDMGANFAHMIGQSEQYKDVARMYFILHSDHESGNVSAHTTHLVHSALSDPYYAYSAGLNGLAGPLHGLANQEVLGWIMEFQKKLNGAEPTKENVTKALWDTLNAGQVVPGYGHAVLRKTDPRYTAQREFCLKTPGLKDDQLFKLVAMIFETAPGVLTEHGKTKNP

SEQ ID NO: 10462 - protein, 279 aa, Pisum sativum
MSRREEEVRLITEPGFVDSTGQDKYNFPSIVCCRFTNKDIVAQIVSASIAGDIVLCAAYAHELPHYGLEVGLTNYAAAYCTGLLLARRVLKTLEMDEEYEGNVEASGEDYSVEPADSRRPFRALLDVGLVKTTTGNRVFGALKGALDGGLDIPHSDKRFAGFDKEKKELDAEVHRKYIFGGHVTAYMKTLIEDEPEKYQTHFSQYIKKGIEADGIEELYKKVHAAIRADPANKKAEKQPPKEHKRYNLKKLTYDERRTKLIARLEALNSAVDEDEDDDE

SEQ ID NO: 10463 - protein, 487 aa, Burkholderia cepacia R18194
MHIKQLYIDGAWQPAAAGGQRAIIDPATGEAIARVAYGSAADAGHAIRAARAAFDAGEWPHLPAEERAACLRRLANALRDEAPALARIETANTGKTLAESSSDVHDAASAFDYFASLAVTETGSMNAAKPHVISVTLREPVGVCGLITPWNYPLLQAAWKLAPALVAGNTVVVKPASLTPLSTHRLVELAHDAGLPRGVLNLVTGGADVGDALAASPQVDLISLTGSNAAGASVMRAAAGNFKRVSLELGGKNPNLVFADADVDTALDYALNAAFFNAGQMCSAGSRLLVERTLHDAFVDALAARIAAIRVGRGDDDATRMGPVISAQQRDRVLALIGEAARDGARIVCGGRAPAGDAFATGFWVEPTLIAGVRTTMAIAREEVFGPVLTVEAFDSEDEAVALANDTPFGLAGAVWTRDFARANRVMRRLRAATVWINDYNVTLPGAPWGGYKASGIGRELSRSGLDEYTELKHAYLNFEASPQRWF

SEQ ID NO: 10464 - protein, 299 aa, Desulfuromonas acetexigens
KAKGSKYPTVESFWYFLLTGDVPTQAQVDAVVAEWKTRQIVPSYVWDAIRALPRDSHPMVMLSVGILALQKDSKFAAFYNSGKFNKMTAWESVYEDASDLCARIPIIAAFIYNLKYRSDFQTAIDPNLDMGANFAHMIGQCEEYKDVARMYFILHSDHESGNVSAHTTHLVHSALSDPYYAYSAGLNGLAGPLHGLANQEVLDWTLKFQEKYCKDVEPTKELVTKALWDTLNAGQVVPGYGHAVLRKTDPRYMSQREFCLNTPGLKDDKLFKLVAMIFETAPGVLTEHGKAKNPWPNVD

SEQ ID NO: 10465 - protein, 322 aa, Oryza sativa (japonica cultivar-group)
MSVIDILTRVDAICQKYGRYDAEKLHGSGVAGEDPFARLYASVDADLNECLEKAEAAKQEKNRATVVALNAEIRGTKAKLLEEDLPKLQRLALKKVKGLSKEELAIRGDLVTALPDRIQSIPDGSATSSKKTGLWGSSGSRAGTGIKFDSTYDLEWKLIYVGSAEDENYDQLLESVLVGPVNVGTYRFVLQRPVLILHWTCCIFAAILDADPPDPSKIRKEDIIGVIVLLLTCSYMGQEFIRVGYYVNNDNDDEQLREEPPAKLLIDRVQRNILADKPSVTKFPINFHPETSAGAGQEQQQQQQSGSPENHPNQGSKPNPDQ

SEQ ID NO: 10466 - protein, 159 aa, Glycine max
MDFRVMGLESPLFHTLQHMMDMSEDGAGDNKTHNAPTWSYVRDAKAMAATPADVKEYPNSYVFEIDMPGLKSGDIKVQVEDDNVLLICGERKRDEEKEGVKYLRMERRVGKFMRKFVLPENANTDAISAVCQDGVLSVTVQKLPPPEPKKPRTIEVKVF

SEQ ID NO: 10467 - protein, 292 aa, Malonomonas rubra
GFWYLLLTGDVPTMEQTLEVVEDWNQRSAVPEYVIDVLRALPRDSHPMAMFSAAIVAMQRESVFASNYAAGKFNKMTCWEDMYEDANTLMARLGPIGAYIYRMKYKGDTHIAPDPELDMGGQFAHMIGQSDEYKDVARMYFILHSDHESGNVSAHTTHLVASALSDAYYAYSAGINGLAGPLHGLANEEVLRWTQNFMQKLGGEVPTEEGLKEALWATLNSGQVIPGYGHAVLRKTDPRYTSQREFCMNTSGLKEYPLFQLVKMIFEVAPGVLTEKNPWPNVDAQSGVIQWY

SEQ ID NO: 10468 - protein, 174 aa, Triticum aestivum
MAPAVMASSATTVAPFQGLKSTAGLPVSRRSRGSLGSVSNGGRIRCMQVWPIEGIKKFETLSYLPPLSTEALSKQVDYLIRSKWVPCLEFSKVGFVFREHNSSPGYYDGRYWTMWKLPMFGCTDATQVLNEVEEVKKEYPDAYVRVIGFDNLRQVQCVSFIAFRPPGCEESGKA

SEQ ID NO: 10469 - protein, 243 aa, Zea mays
MFGYRKAGPDLEAGGSSLLYPGMTESPELRWAFVRKIYVILAVQLAMTAAVSAFVVKVPAVSNFFVSSNAGVALYIFLIILPFLVLCPLRYYHQKHPVNLLLLGLFTVAISFAVGMTCAFTSGKIILEAAILTAVVVISLTAYTFWAAKRGHDFNFLGPFLFAAIMVLMVFSLIQIFFPLGKISVMIYGGLASLIFCGYIIYDTDNVIKRYTYDEYIWAAVSLYLDVINLFLSLLQLLRAADS

SEQ ID NO: 10470 - protein, 464 aa, Arabidopsis thaliana
MENKPSVLTDKYDVGRLLGQGTFAKVYYGRSILTNQSVAIKMIDKEKVMKVGLIEQIKREISVMRIARHPNVVELYEVMATKTRIYFVMEYCKGGELFNKVAKGKLRDDVAWKYFYQLINAVDFCHSREVYHRDIKPENLLLDDNENLKVSDFGLSALADCKRQDGLLHTTCGTPAYVAPEVINRKGYDGTKADIWSCGVVLFVLLAGYLPFHDSNLMEMYRKIGKADFKAPSWFAPEVRRLLCKMLDPNPETRITIARIRESSWFRKGLHMKQKKMEKRVKEINSVEAGTAGTNENGAGPSENGADEPTNLNAFDLIALSAGFDLAGLFGDDNKRESRFTSQKPASVIISKLEEVAQRLKLSIRKREAGLFKLERLKEGRKGILSMDAEIFQVTPNFHLVEVKKSNGDTLEYQKLVAEDLRPALSDIVWVWQGEKDELTSQQETEYQQQQQQEQQEQEEPLKF

SEQ ID NO: 10471 - protein, 489 aa, Pirellula sp. 1
MSTTLPEIAPPKVRHTQLFIDGQWRDSASGKTFATINPATEEEIVQVAEGDKEDIDAAVKAARKAFESGPWRTMDARDRGRLMMKLADAIENEIDELAQLETLDNGKPLRESRHADLPLVIDALRYYAGYADKIQGETVPIRGNYLCYTRKEPVGVVGQIIPWNFPMLMVAWKWGPALATGCTIVMKPAEQTPLTCLRMAQLAKEVGFPDGVINVVPGFGPTAGGALVDHPGVDKIAFTGEHRTAQLIMKNSAQSLKRLTFELGGKSPNVIFSDADLDAAVQGSFVGLYLNQGQCCCAGSRVFVEESIHEAFVEKLTDLTNKRVVGNPFEHTTEQGPQIDQAQFDKIMSYIDKGNQQGASCVSGGKRSGDRGYFIEPTVFTDVQDDMAIARDEIFGPVMSVLSFKDSDDILKRANDTMFGLAAAVWTQDIKKAHHFAANVRAGTVWVNCYDVFDAAAPFGGFKMSGQGRELGTEGLKAYLESKTVTVAL

SEQ ID NO: 10472 - protein, 298 aa, Triticum aestivum
  misc_feature (102)..(102): Xaa can be any naturally occurring amino acid
MEAVARASIAAGSHARVPLCRRPRPRHAVRCLRGRPSVACAAAADADVVRLFDAAKLTVDEFVKSGMVVGLGSGAASGLAVQYLGTRLRRGSLTGIVGIPSXSVICASEAEKAGIKVGSHEEGAQIDFAFADADVIEEGTLAAVIGRGKTESGQPSFIQEKGIVESADKVAFIIDNDKYVNGIEGSIPVLVKSGNWIDTAEEIDDLFLGDAEVWRRPSIGTAGPSGGDFPLVTKEGHHILDVIFTTPIQDLGKVAEGLEKIVGVVDHGIICNTMPYAVIASKGEVQVLDRKSSVIPNT

SEQ ID NO: 10473 - protein, 193 aa, Lactococcus garvieae
MKRIAVLTSGGDAPGMNAAIRAVVRKAISEGIEVYGINHGYAGMVAGDIFPLTSASVGDKVGRGGTFLYSARFPEFAQLEGQLAGIEQLKKHGIEGVVVIGGDGSYHGAMRLTEHGFPAVGLPGTIDNDIVGTDFTIGFDTAVSTVVDAIDKIRDTSSSHHRTFVVEVMGRNAGDIALWSGIAAGADDIAIPE

SEQ ID NO: 10474 - protein, 128 aa, Synechococcus elongatus PCC 6301
MSAKTDEILESLKTLTLLEAAELVKQIEEAFGVSAAAPVGGVVVAAAAGAAAEAVEEKTEFDVVLEEVPADKKIAVLKVVRGITGLGLKEAKDLVEAAPKPIKEGVSKDDAEAAKKELEEAGAKVSVK

SEQ ID NO: 10475 - protein, 286 aa, Synechococcus elongatus PCC 6301
MSADAPVWIDEVFEDRVRYGLRGQILWEETSPFQKITIVDTEHYGRGLLLDDCWMTAERCEVCYHEYLVHPPLTTAASIARVLVIGGGDGGTVREVLRYAEVEQVDLVEIDGRVVELSQEYLGAIGTAWADPRLNVKIGDGIAFVQTAPDASYDVILVDGSDPAGPAAGLFNREFYENCRRVLKPGGVFASQAESPDSFLAVHLEMIETLSAVFAEAKPYYGWVPMYPSGWWSWLYASDTPGQFQKPQSDRLAAIEPQVEIYNRDIHQAAFAQPNFVRRGLSARQG

SEQ ID NO: 10476 - protein, 432 aa, Oryza sativa (japonica cultivar-group)
MLISEYNWNATYKFDMFSTHEHEALQKREPIKAHLLSQPTRYVILVAHAMSAISRPSIILGAHTVTTNGSSARTHEAERNSTVERSTHVLKAASSPKSPKSPIRISPPRRRCGRSSPPLSLLFPHGDRHRVALRGGEVMWLGFVCSIRHVEGFMASPHSQEVKRWVLSDFDIGKPLGRGKFGHVYLAREKRSNHIVALKVLFKSQLKQSQVEHQLRREVEIQSHLRHPNILRLYGYFYDTRVYLILEYALKGELYKELQRCKHFSERRSATYIASLAHALIYLHGKHVIHRDIKPENLLIGSQGELKIADFGWSVHTFNRRRTMCGTLDYLPPEMVEKTEHDYHVDIWSLGILCYEFLYGVPPFEAKEHSETYRRIVKVDLKFPLKPFVSPAAKDLISQMLVKNSAHRLPLHKLLEHPWIVQNADPSGVYRG

SEQ ID NO: 10477 - protein, 342 aa, Glycine max
MAAENVVEFTDLPVKRPREEEEEEEEQTNGVSNDAVSTLPNDPQYPGISAVIPGWFSEISPMWPGEAHSLKVEKILFQGKSDYQNVMVFQSSTYGKVLVLDGVIQLTERDECAYQEMITHLPLCSISNPKKVLVIGGGDGGVLREVARHASVEKIDICEIDKMVVDVSKQFFPDIAVGFEDPRVTLTVGDGVAFLKNVPEGTYDAVIVDSSDPIGPAQELFEKPFFASVAKALRPGGVVCTQAESIWLHMHIIEDIVANCRQIFKGSINYAWTTVPTYPSGMIGFMLCSTEGPLVDFKHPVNPINENDSQQSRPLKFYNSEIHTAAFCLPSFAKRKIGSKTN

SEQ ID NO: 10478 - protein, 375 aa, Kineococcus radiotolerans SRS30216
MSDYYDVLGVSRDASAEDIKRAYRKLARKLHPDVTSDPDAGEKFKEVSQAYETLSTPDKRAAYDRGGSMPGGAAGGFGAGFGFSDIMDAFFGQGGGGRPGAPASRTQRGQDALIRVDVDLAEAAFGGERSIQVDTAVLCTTCQGSCCQPGTSPATCDICHGQGSVQRVVRSLLGQVMTTAPCPTCHGYGTVLPSPCLECNGEGRTRARRPLTIRIPAGVDTGTRIQLASQGEVGTAGGPPGDLYVEIHERPHPVFSRNGDDLLCTLHVPMTAAALGASIPLETLDGSAEEVDVRPGTQGGEVITLKQKGAEHLRAQGRGDLLVTLEVTTPRDLDDEQEELLRRLAELRGEVRPAGKLAPAHQGVFSKLRGKFSGR

SEQ ID NO: 10479 - protein, 287 aa, Glycine max
FGSRQDGIDAIEDVIYHIETYDVTTIRASIPMFLMSRKIKSLGVKMVISGEGSDEIFGGYLYFHKAPNKEEFHQETCRKIKALHKYDCLRANKSTFAWGLEARVPFLDKEFIRVAMNIDPECKMIKKEEGRIEKWALRRAFDDEEHPYLPKHILYRQKEQFSDGVGYGWIDGLKAHAEKHVTDRMMLNAANIFPFNTPTTKEAYHYRMIFERFFPQNSARLTVPGGPSVACSTAKAVEWDAAWSNNLDPSGRAALGVHASAYGNQVKAVEPEKIIPKMEVSPLGVAI

SEQ ID NO: 10480 - protein, 288 aa, Prochlorococcus marinus subsp. pastoris str. CCMP1986
MEIPKIQWYPGHIAKAEKKLTEVINRVDLVIEVRDARIPLSTGHPHLNQWIRNKKHILVINRADMISTETITNWNKWFKKDNIYPLWCDAKNGKGIKEICKSAKESRLSIDNKRLSRGMKVRPIRALTLGFPNVGKSALINRIAKKKVVESARKAGVTRNLRWIRLDNGIDLLDAPGVIPPNLENQKSALNLALCDDIGEAAYEIESVAIEFIKIIFKLKEDKNANISLSKISDRYGVDILKNFDNPHEWIDLVALKHTSGDKRRMAHKLLEDYRNQMLGKISLEVPR

SEQ ID NO: 10481 - protein, 181 aa, Zea mays
MASSMLSSAAVVTSPAQATMVAPFTGLKSSAAFPVTRKANNDITSIASNGGRVSCMKVWPPVGKKKFETLSYLPDLTEVELGKEVDYLLRNKWIPCVEFELEHGFVYREHGSTPGYYDGRYWTMWKLPLFGCTDSAQVLKEVQECKTEYPNAFIRIIGFDNNRQVQCISFIAYKPPSFTGA

SEQ ID NO: 10482 - protein, 528 aa, Glycine max
MAEVAAPKKENPNLLLGRFELGKLLGHGTFAKVHHARNIKTGEGVAIKIINKEKILKGGLVSHIKREISILRRVRHPNIVQLFEVMATKTKIYFVMEFVRGGELFNKVAKGRLKEEVARKYFQQLVSAVEFCHARGVFHRDLKPENLLLDEDGNLKVSDFGLSAVSDQIRHDGLFHTFCGTPAYVAPEVLARKGYDGAKVDIWSCGVVLFVLMAGYLPFHDRNVMAMYKKIYKGEFRCPRWFSSELTRLFSRLLDTNPQTRISIPEIMENRWFKKGFKQIKFYVEDDRVCSFDEKQLQHHDGDDYLATSDSEVEIRRKNSNCNSTSNGNSLPRPASLNAFDIISFSQGFDLSGLFEEKGDEARFVSSAPVSKIISKLEEVAQLVSFTVRKKDCRVSLEGCREGVKGPLTIAAEIFELTPSLVVVEVKKKGGDKAEYEKFCNSELKPALENLGMEDSASSSSSCHQSTHTQSEFQQQHRTFSDSALNRHSDNNECLYDQELGLAEETSIPQLGEPKFEFQQENVPMFTI

SEQ ID NO: 10483 - protein, 376 aa, Thermotoga maritima MSB8
MDALEIHRFLKGKIRTALPVEKVDRETLSLLYTPGVADVARACAEDPEKTYVYTSRWNTVAVVSDGSAVLGLGNIGPYGALPVMEGKAFLFKAFADIDAFPICLSESEEEKIISIVKSLEPSFGGINLEDIGAPKCFRILQRLSEEMNIPVFHDDQQGTAVVVSAAFLNALKLTEKKIEEVKVVVNGIGAAGYNIVKFLLDLGVKNVVAVDRKGILNENDPETCLNEYHLEIARITNPERLSGDLETALEGADFFIGVSRGNILKPEWIKKMSRKPVIFALANPVPEIDPELAREAGAFIVATGRSDHPNQVNNLLAFPGIMKGAVEKRSKITKNMLLSAVEAIARSCEPEPERIIPEAFDMKVHLNVYTAVKGSA

SEQ ID NO: 10484 - protein, 445 aa, Oryza sativa (japonica cultivar-group)
MYKAKRTAAQKVRRCLGKYELGRAIGQGTFAKVRFAKNMETGDHVAIKILDKAKVQKHRLVEQIRREICTMKLIQHPNVVHLHEVMGSKTRIFIVLEYVMGGELHDIIATSGRLKEDEARKYFQQLINAVDYCHSRGVYHRDLKLENLLLDTAGNIKVSDFGLSAISEQVKADGLLHTTCGTPNYVAPEVIEDKGYDGALADLWSCGVILFVLLAGYLPFEDENIVSLYNKISGAQFTCPSWFSAEAKRLIARILDPNPATRITTSQVLQDQWFKKGYESPVFDDKYYPYFHDVYDAFGDSEEKHVKEAMEEQPTLMNAFELISLNKGLNLDNFFESDKKYKRETRFTSQCPPKEIINRIEEAANLLGFNIQKRNYRMRMENIKEGRKGHLNIATEVFQVAPSLHVVELKKAKGDTLEFQKFYQTLSTQLKDVVWELEDAAEDMS

SEQ ID NO: 10485 - protein, 224 aa, Glycine max
  misc_feature (208)..(208): Xaa can be any naturally occurring amino acid
MEDGAGRGLECQKTMDGKVSNSNGPEKEIPSCCLKAKASIPESEAKFHSTVVSGWFSASQTCSGKSGKAVYFNNPMWPGEAHSIKVEKILYKEKSEYQEVLVFESSTYGKVLVLDGIVQLTEKDECAYQEMIAHLPLCSIHSPKNVLVVGGGDGGVLREVARHSSVEHIDICEIDKMVIDVSRKFFPQLAVGFEDSRVHLHVGDAVDXLKSAPEGEYDAIIVDS

SEQ ID NO: 10486 - protein, 114 aa, Solanum tuberosum
MEMFGKIACFVLLCMVVVAPHAEALSCGQVTSGLAPCLPYLQGRGPIGGCCGGIKGLLGAAKTPADRKTACTCLKSAASAIKGINVGKAAGIPRVCGVNIPYKISPSTDCSKVR

SEQ ID NO: 10487 - protein, 114 aa, Solanum tuberosum
MEMFGKIACFVLLCMVVVAPHAEALSCGQVTSGLAPCLPYLQGRGPIGGCCGGIKGLLGAAKTPADRKTACTCLKSAASAIKGINVGKAAGIPRLCGVNIPYKISPSTDCSKVR

SEQ ID NO: 10488 - protein, 128 aa, Archaeoglobus fulgidus DSM 4304
MKQQVEVRQLREGGYVVIDDEPCEILSISVSKPGKHGAAKARIDAIGIFDSQKRSIVQPVTAKIYVPIVERKRAQIISVTGNVAQLMDLETYETFELEVPEELKDKMEQGREVIYLESLGKRKIERMA

SEQ ID NO: 10489 - protein, 412 aa, Archaeoglobus fulgidus DSM 4304
MQYEKVKPPENGEKIRYENGKLIVPDNPIIPYFEGDGIGKDVVPAAIRVLDAAADKIGKEVVWFQVYAGEDAYKLYGNYLPDDTLNAIKEFRVALKGPLTTPVGGGYRSLNVTIRQVLDLYANVRPVYYLKGVPSPIKHPEKVNFVIFRENTEDVYAGIEWPRGSEEALKLIRFLKNEFGVTIREDSGIGIKPISEFATKRLVRMAIRYAIENNRKSVTLVHKGNIMKYTEGAFRDWGYEVAKQEFGEYCITEDELWDKYGGKQPEGKIVVKDRIADNMFQQILTRTDEYDVIALPNLNGDYLSDAAAALIGGLGIAPGSNIGDGIGVFEPVHGSAPKYAGQNKVNPTAEILTGALMFEYIGWKDASEMIKKAVEMTISSGIVTYDIHRHMGGTKVGTREFAEAVVENLQSL

SEQ ID NO: 10490 - protein, 493 aa, Zea mays
MASPFSVPSLIMEEEGRFEAEVAEVESWWGTERFRLTKRPYTARDVVLLRGTLRQSYASGEMAKKLWRTLKARMSLPRAERARAPYVDFLKPIIADGDTGFGGATATVKLCKLFVERGAAGVHLEDQSSVTKKCGHMAGKVLVAVSEHVNRLVAARLQFDVMGVETVLVARTDAVAATLIQTNVDARDHQFIVGATNPGLRGQSLAAVLSAGMSAGKSGRELQAIEDEWLAAARLKTFSECVRDAIAGLGVAGQEKQRRLQEWDRATGGYDRCVSNDQARDIAASLGVTSVFWDWDLPRTREGFYRFRGSVAAAVVRGRAFAPHADVLWMETSSPNVAECTAFAEGVKAACPEAMLAYNLSPSFNWDASGMTDAEMAAFIPSVARLGYVWQFITLAGFHADALVTDTFARDFARRGMLAYVERIQREERINGVETLEHQKWSGANFYDRVLKAVQGGISSTAAMGKGVTEEQFKDPRPATGSSGLQVMAKSRI

SEQ ID NO: 10491 - protein, 175 aa, Oryza sativa
MAPTVMASSATSVAPFQGLKSTAGLPVSRRSTNSGFGNVSNGGRIKFMQVWPIEGIKKFETLSYLPPLTVEDLLKQIEYLLRSKWVPCLEFSKVGFVYRENHRSPGYYDGRYWTMWKLPMFGCTDATQVLKELEEAKKAYPDAFIRIIGFDNVRQVQLISFIAYKPPGCEESGGN

SEQ ID NO: 10492 - protein, 326 aa, Arabidopsis thaliana
MDRISGLPDEVLVKILSFVPTKVAVSTSILSKRWEFLWMWLTKLKFGSKRYSESEFKRLQCFLDRNLPLHRAPVIESFRLVLSDSHFKPEDIRMWVVVAVSRYIRELKIYSSHYGEKQNILPSSLYTCKSLVILKLDGGVLLDVPRMVCLPSLKTLELKGVRYFKQGSLQRLLCNCPVLEDLVVNLSHHDNMGKLTVIVPSLQRLSLSTPSSREFVIDTPSLLSFQLVDRNDNSHTFLIENMPKLREAYINVPFADIKSLIGSITSVKRLAISSEVGYGEGFIFNHLEELTLWNKYSSNLLVWFLKNSPNLRELMLVSETDVSFFH

SEQ ID NO: 10493 - protein, 175 aa, Triticum aestivum
MAPAVMASSATTVAPFQGLKSTAGLPISCRSGSTGLSSVSNGGRIRCMQVWPIEGIKKFETLSYLPPLSTEALLKQVDYLIRSKWVPCLEFSKVGFVFREHNSSPGYYDGRYWTMWKLPMFGCTDATQVLNEVEEVKKEYPDAYVRVIGFDNMRQVQCVSFIAFRPPGCEESGKA

SEQ ID NO: 10494 - protein, 263 aa, Magnetospirillum magnetotacticum MS-1
MGRGRDFRGPQKRGFDDGGAEPRWPDELPPGGGDRFGGGGNRFGGGGGGGFDRGPARAPVAPSGPERDATVKWFNKEKGFGFVELGDGSGDAFLHIRAVEAAGHDDLLPGTRLTVQTAQGQKGPQVTSVTSVDTSTAEAAPPRREAGPRFGGGDRFGGGDRFGGGDRFGGGGDRFGGGGRDRFGGGGRVASGPSVEMTGTVKWYDPAKGFGFVSVNDGGKDVFVHRSALSRAGLDSLAEGQQVTLNVVDGQKGREAQSINVDY

SEQ ID NO: 10495 - protein, 342 aa, Pirellula sp. 1
MKALQLSAPKQWEQIEIDEPSPPGPGEALVRIHRVGVCGTDLGGYLGKFPFFSYPRIPGHELGVEVVAVGEGVENVKVGDRCSVEPYINCQKCYSCERGLTNCCESHQTLGVMCDGGLTEKMILPARKLHPANNLSYEQSALVETLAIGCHAIDRAHVTEKDTVLVIGSGPIGLSAIEFARVAGARVIVADLSQTRLDFVTEKMGMTDTIQFDGSEADIEKLEAMTDGRRADVVVDATGNHHSMRRAMEMAAFGGRVVYVGITQQDLQFPHAPFLHRRELTILASRNALTGDFARIIQLIESGVIDTDPWITHHAKFEEVIESFPAWTDPESGVVKAVIHIS

SEQ ID NO: 10496 - protein, 470 aa, Pirellula sp. 1
MVGLFSLSSLMARTLIRNAQAVLPGDGIHSSSGTVDLRHVLIEDGKILDADASSTASCDHLIEADDLFLLPGVIDDQVHFREPGLTHKEDLATASHACAAGGVTTFLEMPNTKPPAITIEGVQAKEALAAEKSLVNYGFYIGATPDNVAELNAAQNVPGIKIFIGSSTGNLLVDEQAALERIFAETTLPICAHCEDETTVRANAERLAGTTDIHDHSRIRDEAAAVISTARATELARRHQHRFHVLHVSTGAELVSLVDPSPYLTAEVCPHHLFFNVDDYDRLGSLIQMNPSIKTAEDNAKLWQALQDDVIQVIATDHAPHTLEEKAQPYPQSPSGLPAVENSLALMLNQCNAGKVTLPQIAHWMSDAPARVWGITGKGRIANGYDADLVLVRMNSERTIRDEDQHTKNRWSPWNGETLRGWPVTTIVNGSIVWSIDGGFREKIRGQKPIFDHARGGFWNTADGIGPTNA

SEQ ID NO: 10497 - protein, 197 aa, Glycine max
MSASRFIKCVTVGDGAVGKTCLLISYTSNTFPTDYVPTVFDNFSANVVVNGSIVNLGLWDTAGQEDYNRLRPLSYRGADVFILAFSLISKASYENVSKKWIPELKHYAPGVPIILVGTKLDLRDDKQFCIDHPGAVPITTAQGEELRKLINAPAYIECSSKTQENVKAVFDAAIRVVLQPPKQKKKKGKAQKACSIL

SEQ ID NO: 10498 - protein, 146 aa, Triticum aestivum
MASSMLSSAAVATSPAQATMVAPFTGLKSSAAFPVTRKSNTDITSIASNGGRVSCMKVWPPVGKKKFETLSYLPDLTDVELAKEVDYLLRNKWIPCVEFELEHGFVYREHGSTPGYYDGRYWTMWKLPLFGCTDSAQVLKEVQECK

SEQ ID NO: 10499 - protein, 422 aa, Staphylococcus epidermidis ATCC 12228
MSAEKITQSKDGLNVPNEPIIPFIIGDGIGPDIWKAASRVIDAAVEKAYNGEKRIEWKEVLAGQKAYDETGEWLPQETLETIKEYLIAVKGPLTTPIGGGIRSLNVALRQELDLFTCLRPVRWFKGVPSPVKRPEDVDMVIFRENTEDIYAGIEFKQGTSEVKKVIDFLQNEMGATNIRFPETSGIGIKPVSKEGTERLVRAAIQYALDNNRKSVTLVHKGNIMKFTEGSFKQWGYDLAHNEFGDKVFTWQQYDEIVEQKGKDAANEAQSKAEQEGKIIIKDSIADIFLQQILTRPAEHDVVATMNLNGDYISDALAAQVGGIGIAPGANINYETGHAIFEATHGTAPKYAGLNKVNPSSEILSSVLMLEHLGWQEAADKITDSIEATIASKIVTYDFARLMDGAKEVSTSDFADELIKNIR

SEQ ID NO: 10500 - protein, 373 aa, Staphylococcus epidermidis ATCC 12228
MAELKRGLEGVIAAETKISSIIDSQLTYAGYDIDDLAENAQFEEIIFLLWNYRLPNENELSELKEKLFDYMTLNNRVYKHFEEYVTDHVHPMTALRTSVSYVAHFDPEAENESDENKYDRAIRIQAKIASLVTAFARVRDGKEPVKPNSELSYAANFLYMLRGELPTEVEVEAFNKALILHADHELNASAFTARCAVSSLSDMYSGVVAAIGSLKGPLHGGANERVMSMLKEIGSIDNVDHYLDERFANKDKIMGFGHRVYKDGDPRAKYLREMSRKITEETGQSELFEMSLAIEKRMKEEKGLIPNVDFFSATVFHSMNIPHDLFTPIFAVSRTSGWIAHILEQYRDNRIMRPRAKYIGEQNRKYVPIEERP

SEQ ID NO: 10501 - protein, 464 aa, Zea mays
  misc_feature (235)..(235): Xaa can be any naturally occurring amino acid
  misc_feature (326)..(326): Xaa can be any naturally occurring amino acid
MKPPSLVHCFKLLVLLALARLTMHVPDEDMLSPLGALRLDGHFSFHDVSAMARDFGNQCSFLPAAVLHPGSVSDIAATVRHVFSLGEGSPLTVAARGHGHSLMGQSQAAQGIVVRMESLRGARLQVHDGFVDAPGGELWINVLRETLKHGLAPKSWTDYLHLTVGGTLSNAGVSGQAFRHGPQVSNVNQLEIVTGRGDVVTCSPDDNADLFYAALGGLGQFGIITRARIALEPAXDFESFTEDQEMLIMAENSFDYVEGFVIINRTGVLNNWRASFKPQDPVEASHFQSDGRVLYCLELTKNFNSDDTDTMEQEVTVLLSRLRFIXLEFLDRVHTSELKLRAQGLWEVPHPWLNLLIPRSSIRRFAKEVFGKILVGFLSSAPSLSGYGSIAHSMNLNKQIVEFCEEAGIGMKQYLAPYTTQQQWKAHFGARWETFERRKHRYDPLAILAPGQRIFPKASLPLPL

SEQ ID NO: 10502 - protein, 478 aa, Ralstonia solanacearum
MQQRDTLFINGQWVAPQGKGTIDVIHSTTEAVMGTIPEGSAADAEAAVAAARAAFDGWAATPAPKRAEIIQKIADGLKARSEALAQLIAGEVGMPIKLARAIQVGSPVFNWGHFARLLGAFPFEARVGNSLVVREPVGVVGAITPWNYPLHQITLKVAPALAAGCTVVLKPSEVAPLNAFVLAEVIEAAGLPPGVFNLVTGYGPVVGEVLASHPEVDMVSFTGSTRAGKRVAELASQTVKRVALELGGKSASVVLDDADLAAAVKGTLSACFLNSGQTCSAHTRLLVPRARYEEVKALAKQFAATYVPGDPAQETTRLGPLISAVQRDRVLGYIRKGLEEGAELIAGGPEKPEGVSTGYFVRPTVLGNVKPSDTVAREEIFGPVLTILCYDDEEEAIRIANDSIYGLAGGVWSGDEARAMRVARRIRTGQVDINGGPFNMLAPFGGYKQSGNGREQGQYGLEEFLEYKALQLKPAQAT

SEQ ID NO: 10503 - protein, 296 aa, Prochlorococcus marinus str. MIT 9313
MSGAGSAVSTPTIQWYPGHIAKAEQQLSKNLDKIDLVIEVRDARIPIATAHPQLQRWIKGKQHLLVINRRDMISSAARQSWDRWFRDQAQTPWWCDAKAGTGVKQVQQAAIRAGDQLNQRRRSRGMRPRPVRALTLGFPNVGKSALINRLVRQKVVESARRAGVTRTLRWVRLGQDLDLLDAPGVLPPRLDDQQAALHLALCDDIGQAAYDVELVALALLETLTVLEKQAAAGVVAGILKQRYGINLAGDQADAHAWLMTVAERHTSGDTERMAQRLLDDFRRALLGPIALELPLP

SEQ ID NO: 10504 - protein, 160 aa, Oryza sativa (japonica cultivar-group)
MSDSEEHHFESKADAGASKTYPQQAGTIRKNGYIVIKNRPCKVVEVSTSKTGKHGHAKCHFVAIDIFNGKKLEDIVPSSHNCDVPHVNRTEYQLIDISEDGFVSLLTESGNTKDDLRLPTDDSLLGQIKTGFGEGKDLVVTVMSAMGEEQICALKDIGPK

SEQ ID NO: 10505 - protein, 194 aa, Aspergillus nidulans FGSC A4
MASATTFYDFEPVDKKGEAYPLNQLKGKVILVVNTASKCGFTPQFKGLETLYQSIKAKRPDDFVILGFPCNQFGGQDPGSNDQIQEFCQLNYGVTFPVLGKTEVNGDNANPLWTWLKESQPGLLGLKRIKWNFEKFLISADGKVVGRWASTTKPEGLESRILEEIEKAEKQGLLASKAMQPEAAGTDGETAKLA

SEQ ID NO: 10506 - protein, 369 aa, Crocosphaera watsonii WH 8501
MENIPNHLSKIDGQLGKLIILGFPFEELAVNASFEEMIYLFLHNHLPNKNELDNVTKKLLSHRYLDEKILDILKSAASNKIELIEGVRIGVSCLTMDMESNRIDKEGINGALKIISSVPIITAAYWRLLQDQPIIQPHLELSHGANYLYMLTGENPSPENVKTLEIYLNTVIEHGMNASTFAARVVMSTRSDFVSAVTAAIGAMKGVLHGGAPGPVLDMLLDMQESGDIEGYLRHKFENRELLMGFGHRVYRVKDPRAILLSQVSADVWKRREDKEFWAFAVDVESTALRLLREYKPNRRIETNVEYYTALVLHGLGLPPALFTSTFTVSRVVGWLAHCLEQLELDRIIRPSSVYTGPTEQKWCPMEER

SEQ ID NO: 10507 - protein, 158 aa, Streptococcus pneumoniae R6
MTSLYDFSVLNQNNQATPLDSYRGKVLLIVNTATGCGLTPQYQGLQELYERYQDQGFEILDFPCNQFMGQAPGSAEEINTFCSLHFQTTFPRFAKIKVNGKEADPLYVWLKDHKSGPLGKRIEWNFAKFLIGRDGQVFERFSSKTDPKQIEEAIQTLL

SEQ ID NO: 10508 - protein, 489 aa, Escherichia coli CFT073
MHLLTLSINPTFLMRSNHFKEFKMDKKQVTDLRSELLDSRFGAKSISTIAESKRFPLHEMRDDVAFQIINDELYLDGNARQNLATFCQTWDDDNVHKLMDLSINKNWIDKEEYPQSAAIDLRCVNMVADLWHAPAPKNGQAVGTNTIGSSEACMLGGMAMKWRWRKRMEAAGKPTNKPNLVCGPVQICWHKFARYWDVELREIPMRPGQLFMDPKRMIEACDENTIGVVPTFGVTYTGNYEFPQPLHDALDKFQADTGIDIDMHIDAASGGFLAPFVAPDIVWDFRLPRVKSISASGHKFGLAPLGCGWVIWRDEEALPQELVFNVDYLGGQIGTFAINFSRPAGQVIAQYYEFLRLGREGYTKVQNASYQVAAYLADEIAKLGPYEFICTGRPDEGIPAVCFKLKDGEDPGYTLYDLSERLRLRGWQVPAFTLGGEATDIVVMRIMCRRGFEMDFAELLLEDYKASLKYLSDHPKLQGIAQQNSFKHT

SEQ ID NO: 10509 - protein, 143 aa, Glycine max
MAMAFKMATTGMWVTDECKNSFMDMKWKKEHRYIVFKIDEGSRLVTVDKLGGPTEGYDDLTASLPTDDCRYAVFDFDFVTVDNCRKSKIFFIAWSPTASRIRAKILYATSKDGLRRALDGISYELQATDPTEMGFDVIRDIAK

SEQ ID NO: 10510 - protein, 96 aa, Triticum aestivum
RIAMASRLVAAAAAASSSSSASPLARLISRRGLAGAADGHGPAKVPLWKDPLSPSKWKEEHFVLASLSMWGALIYGGFKLFGGKKEDKTEVAPAKA

SEQ ID NO: 10511 - protein, 370 aa, Deinococcus radiodurans R1
MTSPSSTATSSPTTTTAPTPARMRALSKQQPGEGIWMIETEVPTPGPNDLLIRIRKGSICGTDVHIYKWDDWASQTVPVPMVVGHEYVGVVAGMGSEVRGFEIGDRVSGEGHVTCGHCRNCRAGRRHLCRNTQGVGVNRPGSFAEYLVLPAFNAFKLPDDIPDDVAAIFDPFGNAVHTALSFDLVGEDVLITGAGPIGCMAAAVARHVGARNVVITDVNDYRLDLARQMGVTRAVNVAREDLWTVATQELDMHEGFDVGMEMSGSGPAFAQMVSVMNNGGKVALLGIPSGEVQIDWNAVIFKMLTIKGIYGREMFETWYKMAALIQSGLDLTPVITHHYGIGDFQQGFDAMLSGQSGKVILDWETEEQSA

SEQ ID NO: 10512 - protein, 489 aa, Burkholderia cepacia R18194
MSVFGLQRLYIGGGYVDATSGKTFDTFDPATGELLAQVQQASAADVDRAVASAQEGQREWAAMTAMQRSRILRRAVDLLRERNDELAALETRDTGKPIGETLAVDIVTGADVIEYYAGLATAIEGLQVPLRAESFVYTRREPLGVCAGIGAWNYPIQIACWKTAPALAAGNAMVFKPSEVTPLTALKLAEIYTEAGVPAGVFNVVQGDGSVGALLTGHPDIAKVSFTGGVETGKKVMSLAGASSLKEVTMELGGKSPLIVFDDADLDRAADIAVTANFFSSGQVCTNGTRVFVHRSIKDAFTQRVLERVKRIRVGKPTDADTNFGPLVSAAQLDKVLGFIESGKAEGAKLLAGGTRLTDGHFGSGQYVAPTVFGDCRDDMKIVREEIFGPVMSILDFESEDEVIARANDTHYGLAAGVVTENLSRAHRTIHRLEAGICWINTWGESPAEMPVGGYKQSGVGRENGITTLEHYTRIKSVQVELGRYNPVF

SEQ ID NO: 10513 - protein, 510 aa, Photorhabdus luminescens subsp. laumondii TTO1
MCGIGGVFNTENRLIDDIENKLQTIMSKIAHRGDPSRFNEKVVRNNFSIATNRLAIVERDSAYQPISNQEHDLHLVLNGQIYNYKSLRNELIKQGYQFKNGGDAEVALIAYICYGKSFIKKLDGMFSFILFDNKNNKFLLGRDHVGIKPLYYTQKEGNWYVASEIKSLIEFNSEIKPVEPGSIFDGLTSEKYISYDTTIPASSDNVEQAKEKIYSLLDNAVRKRVDTDLPVSIMFSGGIDSTIVLYLAKKYHHDITAISFGLPGSKDIEIAQRYCTENNIKHIIYTFTQEELINNIQDAIYYGEFFEQIDAIDSTIAHFGYYIANRLGFKIALCGEGSDEIFAGYDLFKTYPDPHHLSLYRLNNLHRTDLQRVDRASMRNTVEARVPFMDSALVPYVLSLDFSYKLNNGIEKYILREAFRGKIPEYIIDRPKIRMPDGSGVKNTIIDYVKDIKCNLPRNMVDSLNSIGLTHQSSLYFAEKYLSLGYPLPKERFKESGKDFSESGYFNFIS

SEQ ID NO: 10514 - protein, 232 aa, Bacillus cereus G9241
MLILDGMVMTTEKDEFVYHEMVAHVPLFTHPNPENVLVVGGGDGGVIREVLKHPSVKKATLVEIDGKVIEYSKQYLPSIAGALDNERVEVKVGDGFLHIAESENEYDVIMVDSTEPVGPAVNLFTKGFYAGISKALKEDGIFVAQTDNPWFTPELITTVFKDVKEIFPITRLYTANIPTYPSGLWTFTIGSKKHDPLEVSEERFHEIETKYYTKELHNAAFALPKFVGDLIK

SEQ ID NO: 10515 - protein, 419 aa, Arabidopsis thaliana
MDRISQLSDDLLLQILSFIPGKDVVATSLLSKRWQSLWMLVSELEYDDSYHTGDYKSFSQFVYRSLLSNNAPVIKHLHLNLGPDCPAIDIGLWIGFALTRRLRQLKINIRTSSNDASFSLPSSLYTSDTLETLRLINFVLLDVPSSVCLPSLKVLHLKTVDYEDDASLPSLLFGCPNLEELFVERHDQDLEMDVTFVVPSLRRLSMIDKNYGQCDRYVIDVPSLKYLNITDDAVYDVRQIENMPELVEAHVDITQGVTHKFLRALTSVRQLSLCLSLSEVMCPSGIIFSQLVHLNLSTVVKGWWDLLTSMLQDSPKLQSLKLIDKQHESGLCGIETPIGWKLPSSVPECLLFSLEAFEWIGYKGRRGDREVATYVLKNAACLRTAKFSPESTDVGEKYHMLKELASVPTASTSSKLLFD

SEQ ID NO: 10516 - protein, 415 aa, Dechloromonas aromatica RCB
MNIVIENGRVIDPKNGVDRRASLYVADGKVAGIGQVPAGFVADRSIDAAGCVVCPGFIDLGARLNSIEAELAAAVAGGVTTVVVPPDADPPLDEPELADRLVHRGEEIGKARVLPLGALTLGLKGERLAELAGLKKAGCVAFSQANKTVVDTEALLRALEYAATFDFAVWLQPQDYWLSRNGIAHEGEVASRLGLAGIPVAAETIAIGTIIQLVRDTGCRIHLTRISSAAGMALVHRAQHDGLPISCDVGVHHLLLTENDIGFFNPHARFCPPLRAQTDRQALSDAVVAGWAAICSDHTPVGADDKLLPFGEAKPGATGLEVLLPLTLKWADAAKVDLPTALARITSAPAAVLGLASGQLAIGTTADICIFDPEANWQLTPDALKSRGKNSPWLGYVMTGKVKATLVGGRPVYQA

SEQ ID NO: 10517 - protein, 360 aa, Nostoc punctiforme PCC 73102
MGEPKRIGILTSGGDCSGLNAVIRAVVNCAVDTYGWEVLGIRQATLGLMARPPQFTKLEIDQVDSLLTAGGTMLGTTNKGDPFAFPMTDGSLCDRSEEIIAGYHELGLDALIGIGGDGSLAILRRLAQQGGINLVGIPKTIDNDIGVTEHAIGFDTAVNIATEALDRLHFTAASHSRVMILEVMGRDAGHIAIAAGIAGGANVILIPEIPYTVEHICHKIKERQEKGKNYCLIIVSEAVRTHDGENVTITNRLGQSRYGGIGEYLADKIIEHIGVETRVTVLGHIQRGGTASPLDRLVATAFGVAAVNLIAEDKYDRMVTWQNRQVLSVPITEAIAQYSAVDPNGTLVKTAHGMGIYLGD

SEQ ID NO: 10518 - protein, 307 aa, Staphylococcus epidermidis ATCC 12228
MNAAVRAVTRTAIYNNIEVYGVYQGYQGLLDDDIHKLELGSVGDTIQRGGTFLFSARCPQFKEEDVRKKAIENLRKRGIEGLVVIGGDGSYRGAQRISEECKEIQTIGIPGTIDNDINGTDFTIGFDTALNTIIESVDKIRDTASSHARTFIVEVMGRDCGDLALWAGLSVGAETIVLPEVNTDIKDVAEKIEQGIKRGKKHSIVMVAEGCMSGQECADELTKYINIDTRVSVLGHIQRGGSPSGADRVLASRLGGYAVELLKQGETAKGVGIRNNQLTSTPFDEIFAESDRKFNSQMYELAKELSI

SEQ ID NO: 10519 - protein, 466 aa, Streptomyces viridochromogenes
MFVNGALQPARRHTTVHDRWTGEPVGTVPRDGAEEAAAAVAALAAGRRATTPQQRSAVLTRAADMLTARAEEFSTLITAESGVCRKETLREVSRAAGNLRVAAAEAERIRGESIPLPDGTRLAVTLPEPVGVVLGITPFNRPLNQVVVKAAPALAAGCPLLLKPSEKTPLTALAFAELLVEAGCAKDMLAVVTGEPGEVGPPLAAHPDVAMVTFTGSVATGHAVAAQAAGKRQLLELGGNDPLFVLPDADLRRAAKLAADGSCATAGQSCRGIKRVFVWEEVADEFTALLEPAVAAKRAGDPRREDTDLGPLVSEEAALVVERRIARAVRDGARLVTGGERDGALVRPAVLDHVPPDTELVTEETFGPVAPVIRVRDADEAVRLSNGTAYGLQAGVLTRDSAAFWDIAARLRVGAVNLGEGPHFDSPHIPFGGVKSSGVGREGIRYAIAEMTVTKTVTLPGPYGTG

SEQ ID NO: 10520 - protein, 409 aa, Staphylococcus epidermidis ATCC 12228
MSLRDDALEMHRENQGKLEITPNVKVTNKQQLSLAYSPGVAEPCKEIHEDSRKVYEYTIKGNTVAVVTDGTAVLGLGNIGAEASIPVMEGKAALFKSFAGINGVPIALDTTDTQEIIKTVKLIAPNYGGINLEDISAPRCFEIEETLKKETNIPIFHDDQHGTAIVTMAGLINALKIVDKELTNIKVVLNGSGAAGIAIVKLLHAYGVNNMIMCDSKGAIYSGRNFGMNDTKTYVAKWTNKDKVEGSLEEVIKDADVFIGVSVADILTQDMVKTMADDPIIFAMANPNPEINPNEAKQAGAKVVGTGRSDFPNQINNVLAFPGLFRGALDVEATHINEDMKKAAVEAIVHLIDENELHPDYCIPGPFDKRVAPSVAKNVAKAAMESGVARIKIDTQEIFDKTMKLTDLK

SEQ ID NO: 10521 - protein, 428 aa, Bacillus cereus ATCC 10987
MNYLFKNGRYMNEEGKIVATDLLVQDGKIAKVAENITADNAEVIDVNGKLIAPGLVDVHVHLREPGGEHKETIETGTLAAAKGGFTTICAMPNTRPVPDCREHMEDLQNRIKEKAHVNVLPYGAITVRQAGSEMTDFETLKELGAFAFTDDGVGVQDASMMLAAMKRAAKLNMAVVAHCEENTLINKGCVHEGKFSEKHGLNGIPSVCESVHIARDILLAEAADCHYHVCHVSTKGSVRVIRDAKRAGIKVTAEVTPHHLVLCEDDIPSADPNFKMNPPLRGKEDHAALIEGLLDGTIDMIATDHAPHTAEEKAQGIERAPFGITGFETAFPLLYTNLVKKGIITLEQLIQFLTEKPADTFGLEAGRLKEGRAADITIIDLEQEEEIDPTTFLSKGKNTPFAGWKCQGWPVMTIVGGKIAWQKESALV

SEQ ID NO: 10522 - protein, 393 aa, Synechococcus elongatus PCC 6301
MGKPRIAMTAVSEFRPGLEGVPATLSSISFVDGQRGVLEYRGISIEQLAQQSSFLETAYLLIWGHLPTQQELTEFEHEIRYHRRIKFRIRDMMKCFPDSGHPMDALQASAAALGLFYSRRALDDPEYIRAAVVRLLAKIPTMVAAFQLIRKGNDPIQPRDELDYAANFLYMLTEREPDPVAARIFDICLTLHAEHTINASTFSAMVTASTLTDPYAVVASAVGTLAGPLHGGANEEVLDMLEAIGSVENVEPYLDHCIATKTRIMGFGHRVYKVKDPRAVILQNLAEQLFDIFGHDPYYEIAVAVEKAAAERLSHKGIYPNVDFYSGLVYRKLGIPSDLFTPVFAIARVAGWLAHWKEQLNENRIFRPTQIYTGSHNLDYTPIADRDLAIESD

SEQ ID NO: 10523 - protein, 481 aa, Haemophilus somnus 2336
MNIQHLLKTQAYINGEFISAKNHRTFPVINPANQQVICEITCCGKEETELAIKSAKQAQVHWKKYTAKERSKILKKWFELIMQHQESLAYLLSLEQGKPLSESRAEIAYGASFVEWFSEEAKRAYGEIIPQVREENRLLVIKQPVGVVAAITPWNFPNAMITRKAAPALAAGCAIIIKPAPETPLSALALAALAEQAGIPKGIFNVLPTVYAEEVGSVLTRSTDVRKLTFTGSTKIGKILMQQCADTVKKISLELGGNAPSLIFNDADLDRTVDSVIASKFRNSGQTCICTNRIYVQSEIYRAFADKLKQKVRSFIVGDFQQEAVNIGPLINESAVRKIERHIEDALSKGAILTLGGQRHSLGGTFFEPTILENVSQDMLVCHEETFSPLAALIPFDTEEQAISMANDSEFGLAAYVYTQDFSRIWRLSEELECGLVGVNEGIISNEVSPFGGVKQSGLGREGSRHGLDEFLEMKYLCMKV

SEQ ID NO: 10524 - protein, 337 aa, Oenococcus oeni PSU-1
MNALVLDKMNHLELENLEKPTPKNNEVLIKVAYVGVCGTDKALYQGLPGSADAVPPIVLGHEDSGTVVEIGESVTNFEVGDRVAIDPNIYCHKCDFCRTNRPELCTNLSAVGVTRNGGLEEYVAVPEEVAYKLPDNVSFKQAALTEPLSCVVHGVDLLAIKPFQEAIVLGDGFTGQLFVKTLKAYGVSKVTISTRHLDDEKHVDFLKKVVGADEVVDARSNDFDKDYDVVVEAVGSADVQEQAVKAAAHGGQVLMFGVGKPEQKFSVSSYEIFQKQLTVQGSFINPYTFKAAIAMIAAGKIDPSELVSMELKAAKMNDYLSGKIRTNKAVLNIEAAF

SEQ ID NO: 10525 - protein, 165 aa, Triticum aestivum
PFFHGLKPPSITIRAYLERIMTYSPCSVECFVLALVYVDRIMQANWRFVLTSLNVHRLLLTAVMTGVKYHDDCSYNNAYYAKVGGIPLGELNALEVELLFLLGFDLHVSGEVFERYYSELMKHAPIALGQVTTSSPGLPSVTTITSASPTTTSRLQRHPHPEAAC

SEQ ID NO: 10526 - protein, 396 aa, Pirellula sp. 1
MLCTLKTSLKRDSKLSVITRSVSKRWSCPELHATALGLSDVPTQPFYRQSTGNPMQSAAVVNYAPEPGSVEIREIDRPEIGSQDVLLEVSHVGVCGSDLHQWTAHHSWPVNYPVVLGHEFGGHIVQLGSDVEGWKEGDRVVSETAAIIDSNNPMSRRGLYNLDPTRKGFGYGVNGAMTRYVRVPSRILHEVPHSLAFEHACLTEPCCVAYNAVVRNARIEPGDRVIVMGPGTIGILCAAMARLCGAEVALVGLESDRHRLNIAEENYGCQGIVGDPTDWANQRDGLGCDGVIDAAGSSVTLEIAMQVVRPAGWISKVGWGPQPLGYNLDPLVQKNVTLQGSFSHNWPIWERVLALLTSGQLNVAPIIGGIWPIDQWQTAFDKMHRGEVVKSVLQPI

SEQ ID NO: 10527 - protein, 1993 aa, Lactobacillus gasseri
MVSKNNYSEKMRKIRPQKQRFSIRKFTVGAASVLIGLTFMGVNGRTVKADTTVTQEESINVTNDVANNLKENVENTVSVEEQSAVQHVEQAKTASIETNNDVENNETTNEISSEVAGNNEFVSSAETSAVEEKAANEATTYDAESTKDETVVNNTQNVENNSLQSTESIATPVVENNATTTVEESTPVTETTPVETETKVENVVSPIEETVVEENNQTTVQTDVKEVQSKASVTIPATDTDKYPKEAGALIGDDKYIYQILDLNNTAFWNSSNKKLILSVNRNDLTDENLYAYVTDADYKNMVAEHIIKAGYFKKIEVNNRDFLIVNSGKSNITVGGSSMPVGNATTVVGSTKIIYGLGNITNLDASSVGEIIPVHTEESVIKYYYHNKDGNLVEIPGTDKYPNVSVSGWTGQEFVIDNVDQYKQLIDGFYLDGSNIPSGSFTGTISQFGDGSYYKKVYYSSGNRTEGTVNQLTVDFTVVYRQIDATGKMEVLMYDGSNMDRVIESHTVEAGKSVKFTHNNFTARNPFVTDSAHEVQFIYKDLGSIIPVDENGNQIGDAVKFNNNLTDPIKAGRTDAPIIAGYIADIEYVIPENPGEDIKVIYRLREDVKATITIIDMDNNRNSLAQLNATGKVYSQINFVDLDTTLSNLLDSGYVIISNSFKPGTQFGVHDLNFEIQLKHVLEAVNESQTVQKDIHYVDTVGNELRPSTTQTATFTATGYRDKVTGNIVLVAGTQQVGNDLIATEITDKNASLKWTADKTTFESLKSPDIIGYTTNQKWSTADKVEQNEKLKIENIIYDKKAQVGTIIFWDETSQKQLGTTVNITGNYGEVINYQVIDKVLGSIKDYENNGYILVNNPLGYTTVFGDADYNPGCNDYVVTLKHKIAENSQTKEVNRVITYVYADGPNKGQTAANSVIQKVNFIGKGQYDFVDKVWVSDIVWTAEDGNANYTFAQVNSPKISGYGANRLQVESVLVSGNSNNITEEVLYYANQQTAQIQYIDDVTGKIIGSDTVNGKIDHIISWNLNPEATLKMFENNGYKLVSSDYEFGKDYYYSAEDAKNSFKVHLTRDLIIIDPEDPDSPVYESEDYNKEVTQEIKYVYANGNAAAESNKQTIKFTAYGVVDKTTGKYVVLDENGKVIIGDDGEPIEGKLAWTAEVADPKFTEVSSPIITGYTPDKASVSGTKVTHDLPSKVIVVTYTANDADAKVIFVDKTTGKELEAVTLNGKYGDVINYSTADKIKYYENLGYELVDDGYNGGKFGETTKTFYVTFKHGVVHVHPENPGKPGENINPGGDVKYPTDSGVLNKDVTHTVHYVYADGTIANPSHTQTITFTGSGHINKVTGEYVEVDEDGNIKLDTDGKPVPGKLNWMAMLGNSFLAVTSPQITGHTPSHVQIDGVENVAHDSENYVHTVTYTANAAKAEIVYVDETTGKELEVATVDGKYNEEINYSTADKIKYYESLGYELVKDGYNGGEFGETTKKFYVTFKHGTVVVNPENPGKPDEPINPNDPEGPKYPTDSANLNKDVTHTIHYVYADGTTAKPSHTQTLTFTGSGVIDKVTGQYVEVDENGNIKLDANGKPVPGKLTWVAEDGTTFVEVISPTIAGYTADKTVVNAIEGINQDSNHLETKVVYTANAAKAEIIYIDETTGKELETVTVDGKYNEEINYSTADKIKYYESLGYELVKDGYEQDGKFGLETSRYYVTLKHGTITVTPDDKFTEDDPINPDNPEGPKYPFDSIALDKTITRTIKYVYADGTKAKDDVVQTLRFRGTAVIDKVTGEIIILDENGRKVSDGIKWAALDGTTFVQVISPEIAGYTADKKEIGSVENVDSDTENITETVVYSKNPEKPVEPNKPEEPTEPEVPVEPEKPEAPEAPEEPEKPTESETPEESDQPVEPLKPEASENKPTEATESDKSDAGTLPDNISIDTTAKNVSTVEHKETGKVEAATTNEVSLPQTGHKHSNVGIIGLGLATIASILGLAGTRKRKKN

SEQ ID NO: 10528 - protein, 407 aa, Pasteurella multocida subsp. multocida str. Pm70
MEITLGIAMFTVIVLALAVIILFAKSKLVNSGDITIEINDDPSKAIHLPAGGKLLGALASQGIFVSSACGGGGSCGQCIVKVTEGGGDILPTELSHISKREAKEGYRLSCQVNVKNSMKVELPEEVFGVKKWECTVISNDNKATFIKELKLAIPEGEEVPFRAGGYIQIEAEPHTVAYKDFDIPEEYHEDWDKYNLWRYVSKVDEHIIRAYSMASYPEEKGIIMLNVRIATPPPNNPDAPPGQMSSYIWSLKAGDKVTISGPFGEFFAKETDAEMVFVGGGAGMAPMRSHIFDQLKRLKSKRKMSFWYGARSKREMFYVEDFDTLQAENDNFVWHVALSDPQPGDNWDGYTGFIHNVLYENYLKDHEAPEDCEYYMCGPPIMNASVIKMLKDLGVEDENILLDDFGG

SEQ ID NO: 10529 - protein, 96 aa, Triticum aestivum
AWSRPRYEDLCPSTHNMDVPNVSRREFQLLDITDDGFLSLMNDNGDTKDDVKVPDGEVGDKINKLFKEEEKDTNVIILTAMGEEAAIDAKEAPKGA

SEQ ID NO: 10530 - protein, 296 aa, Glycine max
MAIATETQPQQHKDSSEVSGSAAEQRRWTLNDFDIGKPLGRGKFGHVYLAREKTSNHIVALKVLFKSQLQQSQVVHQLRREVEIQSHLRHPHILRLYGYFYDQKRVYLILEYAPKGELYKELQKCKYFSERRAATYVASLARALIYCHGKHVIHRDIKPENLLIGSQGELKIADFGWSVHTFNRRRTMCGTLDYLPPEMVESVEHDASVDIWSLGVLCYEFLYGVPPFEAKEHSDTYRRIIQVDLKFPPKPIVSSAAKDLISQMLVKDSSQRLPLHKLLEHPWIVQNAEPSGVYRS

SEQ ID NO: 10531 - protein, 406 aa, Vibrio vulnificus CMCP6
MSDTASQVHGAVQTLTQSSDTLFLLLGAIMVFLMHAGFAFLEVGTVRHKNQVNALVKILADFGISTLAYFFIGYWVAYGAHFFADAETLAQGNGYELVKFFFLLTFAAAIPAIVSGGIAERARFYPVLIATFFTVGIVYPLFEGIIWNGNFGIQAWFEATFGVGFHDFAGSVVVHGVGGWIALVAVIFLGMRRGRVRAGKHTNFAPSNIPFLALGAWILCVGWFGFNVMSAQTLNGISGLVAMNSLMAMAGGIVAALIAGKNDPGFIHNGPLAGLVAVCAGSDLMHPLGALVTGSVAGVLFVYLFTYLQNKTKIDDVLGVWPLHGVCGAWGGIAAGIFGQSSLGGLGGVSFTVQLLGTLLGISVALIGAGIVYGAINRLSGLRLSQEDEFNGADLAIHKISSVNAE

SEQ ID NO: 10532 - protein, 193 aa, Candida albicans SC5314
MTRFKSERIAKFAFDFALKNNRKLVTAIHKANIMKLGDGLFRQTVKDVGQDYPGIGVSDLIVDNASMQAVAKPQQFDVLVTPNLYGSILSNIGAALIGGPGLVPGANFGREYAVFEPGCRHVGLDIKGKNSANPTAMILSSAMMLRHLGLNDHADKISKATYDVIAEGNVRTADIGGTATTTEFTEAIINKLD

SEQ ID NO: 10533 - protein, 208 aa, Arabidopsis thaliana
MTSSVIVAGAGDKNNGIVVQQQPPCVAREQDQYMPIANVIRIMRKTLPSHAKISDDAKETIQECVSEYISFVTGEANERCQREQRKTITAEDILWAMSKLGFDNYVDPLTVFINRYREIETDRGSALRGEPPSLRQTYGGNGIGFHGPSHGLPPPGPYGYGMLDQSMVMGGGRYYQNGSSGQDESSVGGGSSSSINGMPAFDHYGQYK

SEQ ID NO: 10534 - protein, 124 aa, Phaseolus lunatus
EPPTEGRLPDATKGSDHLRDVFGKAMGLSDLDIVALSGGHTIGAAHKERSGFEGPWTSNPLIFDNSYFKELLSGEKEGLLQLPSDKALLTDPVFRPLVEKYAADEDAFFADYAVSHQKLSELGF

SEQ ID NO: 10535 - protein, 203 aa, Cucumis sativus
VLTGDSGVGKSNLLSRFSKNEFRFDSRPTIGVEFAYRNIKVADKLVKTQIWDTAGQERFRAITSSYYRGALGALLVYDITRVATFDNIKKWLRELREFGNPEMVIILVGNKCDLHQSREVQEEEARHLAELENLFFMETSAKDNLNVEEAFLEMVRRIHAIASQKTLDLHKKFEKLVAFPNGKEIISIHEVTPTKPNSNCCSL

SEQ ID NO: 10536 - protein, 420 aa, Methanocaldococcus jannaschii DSM 2661
MWGENIATADLFANATDIHSIVQALTTLANASDVFFLVVMGVLVFMMQWGFAMLEGGQVRKKNVNNVMMKNMVDWLIGCVAWLFIGGILCSKGFDLSAFIDWWKQILGTNWPNNGLDLASWFFGLVFCATAATIVSGGVAERIKFSAYVLISLIITGLLYPLFVYLGPWGASIVPWHDYAGSLVVHGLGGFLALGAIAALGPRIGRFVDGRPVPILGHNIPMAVFGAFALAIGWYGFNVGSSLALGDISGLVCATTTMAMAGGGIGALIASRNDVLFTANGIVAGLVAICSGTDVVSPIGGLIIGLIAGLQVPIVYKLVEKAGLDDVCGVVPVHGTAGVIGAILTGILGLKIFGGAGGVSLIDQIIGAVFCIIYGTGLGYILAKIVGIALGGLRVSEEEEKMGLDMAEHKMPAYPEETVI

SEQ ID NO: 10537 - protein, 107 aa, Phaseolus lunatus
NEINLGDYKGRVLIIVNVASQCGLTNSNCTELSQLYEKYKQKGLEILAFPCNQFGAQEPGSNEQIQEFVCTRFKAEFPVFDKVDVNGDKADPLYKYLKSSKGGLFGD

SEQ ID NO: 10538 - protein, 422 aa, Halobacterium sp. NRC-1
MSYDKIEVPEGGAKVSYDEAADELDVPDTPIIPIIHGDGIGKDVGPIAQDVLSAAAEATGHDIEWMEVYAGESAREMYDENLPEETVEAIREHRVAIKGPLTTPVGAGFRSLNVALRQTLDLYANVRPTYYLDGVPSPMKAPEEMDMVTFRENTEDVYAGIEWEAGTDEAEQVRSFVEDEMDFDDVMHDGDIGIGLKPISEKGSKRLVREAIDYAIENDRDTVTLVHKGNIMKFTEGQFGDWGMEVAEEEYPDDEVFAAPDSLWEEQDEVDIPEDAVMVEERLADAMLQWMQLRTDEFDVLAMPNLNGDYLSDAAGAQIGGLGIAPGANFGAGRCLAEPVHGSAPKRAGQDKANPTALILSGRLLFEYIGWDDASTLVRDAVEDTIESGTVTYDLARQRDDAEEVSSTTYAEAVIDRIEDLA

SEQ ID NO: 10539 - protein, 120 aa, Glycine max
QFWGAVLKGPIALLGTGLSPPGPELKVLGGGGFLKAWGGISFLRFNFPGAWSYGKKYGLFLGPLFFLWGKKPAPLGGLESKGALAVGTPADFVVWPPELGFALGDDYPVFPHPFVCFPCF

SEQ ID NO: 10540 - protein, 197 aa, Bacillus subtilis subsp. subtilis str. 168
MTNRDIVWHEASITKEEYQQKNKHKSSILWLTGLSGSGKSTIANAAARELFEQGYQVIVLDGDNIRHGLNRDLGFSDEDRKENIRRIGEVAKLFVQQGTIVITAFISPFREDRQQVRELVEAGEFNEVYIKCDLDICEQRDPKGLYKKARNGEIPFFTGIDSPYEEPEAPELVLDSGQHDREACKNQLIEFVKQKLS

SEQ ID NO: 10541 - protein, 535 aa, Glycine max
MGVLSSHRIQLLLFPIVVLLWSASAANSANNTFLHCLVNHSEPSHPITSAIFTPNNTSFSSVLEAYIRNLRFNTSTTRKPFLIITALHVSHIQASIICAQKHNLQMKIRSGGHDYEGVSYVAEVPFFILDMFNLRTIEVDIGTETAWVQAGATLGEVYYRIAEKSKTHAFPAGVCHTVGVGGHISGGGYGNMMRKYGLSVDNVIDAQMVDVQGRLLDRKSMGEDLFWAITGGGGASFGVVLAYKIKLVRVPEIVTVFQVGRTLEQNATDIVYNWQHVAPTIDNDLFLRVILDVVNGTRNGTKTVRARFIALFLGDSKSLVSLLNDKFPQLGLKQFDCIETTWLRSVLFWDNIDIATPVEILLERQPQSFKYLKRKSDYVKKPISKEGWEGIWNKMIELEKAIMYFNPYGGRMAEIPSTASPFPHRAGNLWKIQYQANWNKPGKEVADHYINLTRKLHKFMTPFVSKNPREAFYNYKDLDLGINPNGKNSYAEGRVYGVEYFKDNFDRLVQIKTKVDPHNFFRNEQSIPTLSYRKG

SEQ ID NO: 10542 - protein, 268 aa, Bifidobacterium longum DJO10A
MLNNGTVIPQVGLGVFQTPDGDTTVNAVQTALENGYRHIDTAMIYHNEASVGEGIRRAGVPRSDFFLTTKLWNDDIRARCGKDAFQESLDRLGVDYVDLYLIHWPADGWQQAWDDLQEIYASGRAKAIGVSNFQKHHIDELLTHSDVVPAVDQVESSPQFTNQELIGQLRAKGIHTEAWSPLGGTGGNLLSNPVLAGIGAKYGRSAAQVVIRWHIQRGIVVLPKSTHAERIKQNFEVFDFNLSVDDMTAISAINTGKRNGADPDNFNF

SEQ ID NO: 10543 - protein, 325 aa, Magnaporthe grisea 70-15
MADQHDVDLDSIIDRLLEVRGSRPGKQVQLLEAEIRYLCTKAREIFISQPILLELEAPIKICGDIHGQYYDLLRLFEYGGFPPEANYLFLGDYVDRGKQSLETICLLLAYKIKYPENFFILRGNHECASINRIYGFYDECKRRYNIKLWKTFTDCFNCLPIAAIIDEKIFTMHGGLSPDLNSMEQIRRVMRPTDIPDCGLLCDLLWSDPDKDITGWSENDRGVSFTFGPDVVSRFLQKHDMDLICRAHQVVEDGYEFFSKRQLVTLFSAPNYCGEFDNAGAMMSVDESLLCSFQILKPAEKKQKYVQRLGGRSSNASSRITSSKP

SEQ ID NO: 10544 - protein, 73 aa, Triticum aestivum
MASRSCTFVEILLAVILPPLGVFLRYGCCSMEFLICLLLTILGYIPGIIYAVYVLVAHGSASEESGRDYDALG

SEQ ID NO: 10545 - protein, 196 aa, Glycine max
  misc_feature (146)..(146): Xaa can be any naturally occurring amino acid
HPVPWPKRLVLFYLYPSKSQVWGENFDHKKLVITTLAANGKKEESNGAPNDTYPAFPGWYADVSWPGEAHTYNIEKILFHGKSEFQELLVFESSRQGKVAILDGHIQLTENDEFAYQEMLTHLALCSIPDPKKVLLIGGGDGGILXEISPHSSGEHIDICELDAMVIDVYSVVFHDITYGCKESQLRVHMSNGVAL

SEQ ID NO: 10546 - protein, 415 aa, Magnetospirillum magnetotacticum MS-1
MFILLGAVMVLAMHSGFAFLEVGTVRKKNQVNALVKIISDFAVSTIAYFFVGYGVAYGTNFLVGADVLIGKTGNAFAASGYDLVKFFFLATFAAAIPAIVSGGIAERAKFTTQLMATAILVGLVYPLFEGMVWGTRFGFQELMKGWFGAAFHDFAGSVVVHAVGGWIGLGAVLMLGTRLGRYRKDGRLVAFPPSNIPFLALGAWILSVGWFGFNVMSAQVIADISGLVAMNSLMAMVGGILTSLVVGRNDPGFIHNGALAGLVAVCAGSDVMHPIGALVTGGIAGALFVWLFNLCQIKWKIDDVLGVWALHGMCGFLGGVACGVFGQEALGGLGGVSFGGQIAGTVIGAAFGLAGGLAVYGGLKAAFGIRLSDEEEFAGADLSIHQIGAYPEDATTVHDDGLAMSVHSANKRKAG

SEQ ID NO: 10547 - protein, 249 aa, Zea mays
MFGYQKGLDVEAGTSGAAATGGARQLYPGMQESPELRWALIRKIYVILSLQLLLTAVVAAVVVKVRAIPHFFTTTSAGLGLYIFLIILPFIVLCPLYFYHEKHPVNLILLGLFTVAISFAVGMTCAFTSGKVILESAILTTVVVLSLTAYTFWAVNRGKDFSFLGPFLFAAIIVLLVFALIQILFPLGKLSQMIYGGLASLIFSGYIVYDTNNIIKRYTYDQYVWAAVSLYLDVINLFLSLMTLFRAAD

SEQ ID NO: 10548 - protein, 268 aa, Acinetobacter sp. M-1
MRIPQFGLGTFRLKDQAVIDSVKTALEVGYRAIDTAQVYENEAAVGQAIAESGVARQDLFLTTKIWVDNFAEDKFIPSLKDSLQKLRTDAVDLTLIHWPAPALGVSIPSVMQLLLEAKQQGLTKQIGISNFNIALTQQAIDSIGIEHIATNQIELSPYLQNRNLVNYLREQNIDVTSYMTLAYGKVLQDPTLIEIAAQHQATTAQVALAWALQNGFAVIPSSTKRENLISNLKAQDLTLSAEEMQLIAQLERNGREVSPEPFAPEWDK

SEQ ID NO: 10549 - protein, 224 aa, Listeria monocytogenes EGD-e
MINQKKIAGEKACEWIKDGMVVGLGTGSTVYYTIEKLGEMVNNGLHITGVATSEETNKQAQNLGIPLKSLNDVTEIDITIDGADEIDTDFQGIKGGGGALLREKMVASASLKNIWVVSEEKLVRNLGKFPLPLEVIPFGWKQVERKLEKEHIQTNLRKQSSGEVYVTNNGNYILDIVNQTFTDAEMWQEKLAQIPGIVEHGLFLHYVDIIICAKANGEIELIKK

SEQ ID NO: 10550 - protein, 365 aa, Glycine max
MGSAAETQITPTHVSDEEANLFAMQLASASVLPMVLKSALELDLLEIIAKAGPGVHLSPTDISSQLPTQNPDAPVMLDRILRLLACYNILSFSLRTLPDGKVERLYGLAPVAKYLVKTEDGVSIAALNLMNQDKVLMESWYYLKDAVLEGGIPFNKAYGMTAFEYHGTDPRFNKVFNKGMADHSTITMKKILETYTGFEGLKSLVDVGGGTGAVVNMIVSKYPTIKGINFDLPHVIGDAPSYPGVEHVGGDMFVSVPEADAIFMKWICHDWSDEHCLKFLKNCYEALPDNGKVIVAECILPVAPDSSLATKGVVHIDVIMLAHNPGGKERTEKEFEALAKGSGFQGFRVLCCAFNTYVMEFLKKV

SEQ ID NO: 10551 - protein, 389 aa, Streptococcus bovis
MSTKDVKELAIEQAKKFGGKLEVCPKVPIETKADLGIAYTPGVAAVSSAIYEKKERAYELTTKKNTVAVISDGSAVLGLGNIGPEAAMPVMEGKAALFKRFAGVDSIPLVLDTQDTEEIIQTVKFLAPTFGGINLEDISAPRCFEIEQRLIDELDIPVFHDDQHGTAIVVLAALYNSLKLINKKIEDIHVVINGGGSAGLSITRKFLAAGVKHIIIVDRTGILSETDTALPPHHAEIAKLTNREHRTGDLATALEGADVFVGVSAPGVLKPEWIQQMNEQPVIFAMANPVPEIFPDEALAAGAYIVGTGRSDFPNQINNVLAFPGIFRGALDARAKKITIEMQIAAAKGIAKLIPDNELTPTNIIPDPFQEGVAKVVAESVRNAVKETN

SEQ ID NO: 10552 - protein, 197 aa, Sulfolobus acidocaldarius
MTQGPNYRIKFRRRREGKTDYYTRYTYVINNAIRFVPRLTNKYVIVSVSKFDQKGDIMIAYAHSIELVKKYGWKGDTNNTPAAYLTGYLAGLRAVKSGVKAAVSDIGLFVPVKGGRIFAVIKGAIDAGLKVPVGDLGKLKDRVNGSHISAYAQKLKNENQELYNKLFSSYIQRGLDPVLLPQHFEEVLNKIKENGGK

SEQ ID NO: 10553 - protein, 423 aa, Pseudomonas aeruginosa
MTISIRGARVIDPASDLDQVGDLHIEAGKIVAIGAAPAGFSAQKTLDGAGLVAAAGLVDLSVALREPGYGRKGNVESETRAAAAGGTTSLCCPPYTRPVLDTPAVAELILDRAREAGNAKVYPIGALTRGFGGEQLSELVALRDTGCVAFTNGLHGFASNRILRRALEYAATFDLTVIFTSQDTDLAEGGLAHEGPTASFLGLAGIPETAETVALARNLLLVEQSGVRAHFSQLTSARGIELVAQAQARGLPVTCDVALYQLILTDEALVGFSSLYHVQPPLRTRADREALREAVNNGVVQAIASHHQPHEPDAKNAPFAATEPGISGAELLLPLAMTLVQDGLLDLPTLLARLSHGPAQALRLPAGRLAVGQAADLVLFDPQGSTLAGESWYSKGQNSPFVGHCLPGRVRYTLVDGHLTHEG

SEQ ID NO: 10554 - protein, 468 aa, Ralstonia solanacearum
MAYPPIPVPADAAPSANTAWQARSRAAVWHPCTQNARLDAMPPLPIARGQGPWLIDFDGKRYLDGTSSWWVNLFGHANPHINAALKAQLDMLEHTMLAGATHRPAVELAERLVGLTGGVLGHSFFGSDGASAVEIALKMSFHAHRNAGQGARSRFVCLEHGYHGETLGALGVTDVAIFRDAYDPLILQSHRVASPDARLAGPGETGADVAERALAALRDCLSANAGTIAAVIIEPLVQCAAGMAMHDASYLRGVRALCDQFGVHWIADEIAVGCGRTGTFFACEQAGVWPDLLCLSKGISGGYLPLSIVLSRDAIYDAFNEDAPVRSFLHSHSYTGNPLACRAALATLDLFAEEDVFARNRVTAARIAQGLAPLSHDARFAHLRQAGMITAFDVHPEVAGPRFAERFALTARAHGLLLRPIGHTVYLLPPYVLTDDETDTLVERTLHTLEDTLAQATGAHEGETHAIA

SEQ ID NO: 10555 - protein, 386 aa, Medicago sativa
MAIHHHHHNHQQLQQHTSSLFDALYCDEEEKWEDDDEGEVVDEGAQSDVTTTNYDILDSTSLLPLLLLEQNLFNEDEELNTLFSKEITQQETYYEDLKNVINFDSLSQPRREAVEWMLKVNAHYGFSALTATLAVNYLDRFLLSFHFQKEKPWMIQLVAVTCISLAAKVEETQVPLLLDLQVQDTKYVFEAKTIQRMELLILSTLKWKMHPVTTHSFLDHIIRRLGLKTNLHWEFLRRCENLLLSVLLDSRFVGCVPSVLATATMLHVIDQIEQSDDNGVDYKNQLLNVLKISKEKVDECYNAILHLTNANNYGHKRKYEEIPGSPSGVIDAVFSSDGSNDSWTVGASSYSTSEPVFKKTKNQGQNMNLSPINRVIVGILATATSP

SEQ ID NO: 10556 - protein, 489 aa, Haloarcula marismortui ATCC 43049
MSQPDSQTAWDRLYIDGEWRDAGTSETIPVTNPATGDEIAAVPAGTEGDVNDAYQAAEAAQSDWAALSREERNEYVQAMIGVMQERLDEIVELLATESGSVQAKATAEANFAMADFQSALEMVPPEEEVRDSMYHEDKDHHIVREPAGVVGIISPWNFPLHLTTRALGPALALGNTVVIKPATDTPITGGLLLADIAEEAGLPDGVVNVVTGHGSDIGDRMAGHPTARVMSFTGSTAVGRSVASQAGDALALPALELGGNGPFVVTEDADIEAAAKAGSVGAFGHQGQVCISINRHLVHEDVYDEYVEKLVEHAESLTIGNPLDEDVEFGPIINESQVEQLTSFIEQTVDAGATLETGGEVEDLFLEPTVLSECTNDMSAACNEHFGPVAPVIPFESDEEAVELANDTEYGLAAGVYSSDVEHGRSIADQIDAGMVHVNDHPIQDEPNAPFGGMKNSGLGRYNGEWIMDELTETKWISVQHEERDYQLL

SEQ ID NO: 10557 - protein, 208 aa, Glycine max
  misc_feature (130)..(130): Xaa can be any naturally occurring amino acid
  misc_feature (157)..(157): Xaa can be any naturally occurring amino acid
  misc_feature (168)..(168): Xaa can be any naturally occurring amino acid
  misc_feature (179)..(179): Xaa can be any naturally occurring amino acid
  misc_feature (185)..(185): Xaa can be any naturally occurring amino acid
  misc_feature (190)..(190): Xaa can be any naturally occurring amino acid
  misc_feature (192)..(193): Xaa can be any naturally occurring amino acid
  misc_feature (204)..(204): Xaa can be any naturally occurring amino acid
  misc_feature (206)..(206): Xaa can be any naturally occurring amino acid
MSQLGVALQESLRTQREARSTILGLLREQMDGVDGGTRRRRSLKERFGFIGMGCCGASWGFRSDALSVNQGEQEQQQETDPGRVAAPECVGPAGSGSGMNLAAALAAERQLRVPQEEGGGVRAPWRVSLXRLLEETEGGDAAPAEKEKEKEENVLGXDSVCCVCMGRXKGAALIPCGHXFCRVCXRELWXNXXSCPLCNRSILXIXDI

SEQ ID NO: 10558 - protein, 289 aa, Zea mays
  misc_feature (69)..(69): Xaa can be any naturally occurring amino acid
  misc_feature (80)..(80): Xaa can be any naturally occurring amino acid
  misc_feature (88)..(88): Xaa can be any naturally occurring amino acid
  misc_feature (93)..(93): Xaa can be any naturally occurring amino acid
  misc_feature (136)..(136): Xaa can be any naturally occurring amino acid
  misc_feature (141)..(141): Xaa can be any naturally occurring amino acid
  misc_feature (204)..(204): Xaa can be any naturally occurring amino acid
  misc_feature (237)..(237): Xaa can be any naturally occurring amino acid
  misc_feature (269)..(269): Xaa can be any naturally occurring amino acid
  misc_feature (273)..(273): Xaa can be any naturally occurring amino acid
  misc_feature (278)..(278): Xaa can be any naturally occurring amino acid
MGGGRVMATAAKVAGIGVAKGGFRGGFGVPAAANDQFIVRNTSASKPVSASISSAGHPSVEEDAVVMRXPVWEDEWEFAXVETKTIPXGVFDXPPSLQEAKESTDDLKDAFTLPWMEGSNGSWSWFKMCSRFPPNXNSPLXSNFIVFKHKAFAFLSENTAAQSVVTSIASDPKVWDAVMENKDLMKFLETNTASTKDEADNDDXSELSSETESEEDSEEKPIQLMEILRDMKLKAVXMMENVSSYFGGLFRTETFTEGGQERKRMLLNXPTTXLGLAXLRYFMVVLKRA

SEQ ID NO: 10559 - protein, 370 aa, Glycine max
MAALSNGHGSSFFKMPPIKFTKLFINGEFVDSLSGREFETRDPRTGEVITRIAEGAKEDVDVAVKAARAAFDYGPWPRMPGAERAKIMMKWADLVDQNIEEIAALDAIDAGKLYHWCKAVDIPAAASTIRYYAGAADKIHGEVLKASREFHAYTLLEPIGVVGHIIPWNFPSTMFVAKVSPSLAAGCTMVLKPAEQTPLSALFYAHLAKLAGIPDGVLNVVPGFGQTAGVAISLHMDIDKVSFTGSTEVGREVMRAAANSNLKPVSLELGGKSPVIVFDDADVDKAAELALLGILFNKGEICVAGSRVLVQEGIYDEFEKKLVEKAKAWVVGDPFDPKVQQGPQVDKFSSKSASAYKKTQTNGVTLFWTP

SEQ ID NO: 10560 - protein, 414 aa, Escherichia coli
SKVVVPAQGKKITLQNGKLNVPENPIIPYIEGDGIGVDVTPAMLKVVDAAVEKAYKGERKISWMEIYTGEKSTQVYGQDVWLPAETLDLIREYRVAIKGPLTTPVGGGIRSLNVALRQELDLYICLRPVRYYQGTPSPVKHPELTDMVIFRENSEDIYAGIEWKADSADAEKVIKFLREEMGVKKIRFPEHCGIGIKPCSEEGTKRLVRAAIEYAIANDRDSVTLVHKGNIMKFTEGAFKDWGYQLAREEFGGELIDGGPWLKVKNPNTGKEIVIKDVIADAFLQQILLRPAEYDVIACMNLNGDYISDALAAQVGGIGIAPGANIGDQCALFEATHGTAPKYAGQDKVNPGSIILSAEMMLRHMGWTEAADLIVKGMEGAINAKTVTYDFERLMDGAKLLKCSEFGDAIIENM

SEQ ID NO: 10561 - protein, 451 aa, Zea mays
MAYAARRKKRLGRYEVGRTIGQGTFAKVKFAVDSDTGAPVAMNELELPYTKSQRSERRSKIKREISIMKIVRHPNIVRLNEVLAGRTKIYIVLELVTGGELFDRIVRHGKLRENEARKYFQQLIDAIDYCHSKGVYHRDLKPQNLLLDSRGNLKLSDFGLSTLSQNGVGLVHTTCGTPNYVAPEVLSSNGYDGSAADIWSCGVILYVLMAGYLPFEENDLPHLYEKITAAQYSCPYWFSPGAKSLIQRILDPNPRTRITIEEIREDPWFKKNYVTIRCGEDENVSLDDVQAIFDNIEDKYVSDEVTHKDGGPLMMNAFEMIALSQGLDLSALFDRQQEFVKRQTRFVSRKPAKTVVATIEVVAESMGLKVHSRNYKVRLEGPASNRASQFAVVLEVFEVAPSLFMVDVRKVAGDTPEYHRFYENLCSKLCSIIWRPTEVSAKSTPLRTTTC

SEQ ID NO: 10562 - protein, 283 aa, Pediococcus pentosaceus ATCC 25745
MNNLTDTYTLNNGVKIPVVGFGTWQSKDGDEAYNAVKAALEAGYRHIDTAAAYGNEESVGKAIKDSGIDRKELFITSKLWNRDHGYESAKKALDTSLAKLGTDYLDLYLIHWPNPVQFRDEWQQRNADSWRAMEEALDAGKVRAIGVSNFRAHHLDELLKTAKVTPAVNQIFLNPSDTEDEVVAYNKEHGILSEAYSPLGTGKIFTIPELKDIAAKYNKSVAQVVLRWSLQHGFLPLPKSVHADRIKQNTEIFDFELSDDDIKKIDGFHGVAGLAQDPDATDF

SEQ ID NO: 10563 - protein, 213 aa, Zea mays
  misc_feature (199)..(199): Xaa can be any naturally occurring amino acid
MDDEEHEVYGQEIPEDGDMDGADVDMAAAGDDAAKLQELDEMKRKLKEMEEEAAALRDMQAKVAKEMQGGDPSISTAEAKEQVDARSVYVGNVDYACTPEEVQQHFQACGTVNRVTILTDKFGQPKGFAYVEFLEQEAVQEALNLNESELHGRQIKVAPKRTNVPGMKQRPPRGYNPYHGYPYRSYGAPYFPPYGLWGXAPRFRRPMRYRPYF

SEQ ID NO: 10564 - protein, 406 aa, Glycine max
  misc_feature (201)..(201): Xaa can be any naturally occurring amino acid
  misc_feature (215)..(215): Xaa can be any naturally occurring amino acid
MVLEATMICIDNSEWMRNGDYSPSRFQAQADAVNLICGAKTQSNPENTVGVLTMAGKGVRVLVTPTSDLGKILACMHGLDIGGEMNLAAGIQVAQLALKHRQNKKQQQRIIVFAGSPVKHEKKMLEMIGRKLKKNSVALDIVNFGEEDEGKTEKLEALLAAVNNNDTSHIVHVPSGPNALSDVLISTPIFTGDGEGGSGFXAAAAAAAAAGGVSXFEFGVDPNLDPELALALRVSMEEDRAKQEAAAKKAAEDAAKQEKGGEQQASSQDATMTERASAAMSEAENKTSDLMDDENALLQQALAMSMDDPAISHDVKDTDMSEASASDPDLALALQLSIADSTKDQGSQSDMSKLLADQSFVSSILASLPGVDPNDPSVKDLLASMQNQSEPQQKNDDKPSNEEEKK

SEQ ID NO: 10565 - protein, 108 aa, Hyacinthus orientalis
LTVSVASGQYFCLHFEAFQLGMAPVYRAFLRFMGDDSEAKNYSYSREVGATGRKMIWQGVPRSIRDSHRKVRDSYDAIVIQRNIALFFSGGDRKELKLRVTGRIWKEQ

SEQ ID NO: 10566 - protein, 283 aa, Streptococcus agalactiae 2603V/R
MATIQWFPGHMSKARRQVQENIKHVDFVTILVDARLPLSSQNPMLTKIVGDKPKLMILNKADLADPIRTKEWRDFYESQGLKTLAINSKEQSTVKKVTDIAKILMSDKIANLRGRGIQKETLRTMIIGIPNAGKSTLMNRLAGKKIAVVGNKPGVTKGQQWLKSNKELEILDTPGILWPKFEDELVGLKLALTGAIKDQLLPMDEVTIFGLNYFKTYYPDRLKERFKSINLEDEAPEIIMALTQKLGYRDDYDRFYNLFVKEVRDGKLGRYTLDIVGEHDGNN

SEQ ID NO: 10567 - protein, 503 aa, Hordeum vulgare subsp. vulgare
MVAPAKIPQRQLFIDGEWRAPALGRRLPVINPTTEVSIGEIPAGTSEDVDAAVAAARAALKRNRGRDWSRAPGAVRAKYLRAIAAKMIERKSDLARLEALDCGKPLDEAAWDMDDVAGCFEFFAGHAEALDKRQNAAVALPENFKCHLKKEPIGVVALITPWNYPLLMAVWKVAPALAAGCTAVLKPSELASVTCLELGDVCKEVGLPSGVLNIVTGLGNEAGAPLSSHPDVDKVAFTGSYATGQKIMVAAAPTVKPVTLELGGKSPIVVFDDVDIDKAVEWTLFGCFWTNGQICSATSRLLIHKNIAKEFVDRMVAWSKNIKVSDPLEEGCRLGPVVSEGQYEKIKKFVANAKTEGATILTGGVRPKHLEKGFFIEPTIITDINTSMEIWREEVFGPVLCVKEFSTEEEAIELANDTHYGLAGAVISGDRERCQRLAEEIEAGCIWVNCSQPCFCQAPWGGNKRSGFGRELGEGGIDNYLSIKQVTEYTSDAPWGWYKAPAN

SEQ ID NO: 10568 - protein, 156 aa, Burkholderia cepacia R18194
MTSDDLTPGGRVRAANVFDRGDCKGGNHSPQLTWHNPPPGTHGYAVTIFDPDAPGHGWWHWAVAGIPATVTSLPADASASGFLRRIGASEARNDFGIDGYGGPCPPPGKPHRYVITVYALKGDDLRVAQGRPAPMFEHEIGTLAIGTAQLTVNYGQ

SEQ ID NO: 10569 - protein, 506 aa, Hordeum vulgare subsp. vulgare
MAAPPAIPRRGLFIGGGWREPTLGRRIPVINPATEDTIGDIPAATAEDVELAVAAARSAFLLDGGSRWARASGATRAKYLNAIAAKIKEKISYLALLETVDSGKPKDEAVADMDDVAACFEYYAALAEALDGKQHAPISLPMEEFKTYVLKEPIGVVGLITPWNYPLLMATWKVAPALAAGCTAVLKPSELASLTCLELGAICEEIGLPSGVLNIITGLGPDAGAPIASHPHVDKIAFTGSTATGKTIMTAAAQMVKPVSLELGGKSPLVIFDDVADIDKAVEWAMFGCFFNGGQVCSATSRLLLHEKIAERFLDRLVEWAKNIKISDPLEEGCRLGSVISKGQYEKIKKFISTARSEGATILHGGDRPKNLGKGFFIEPTIITGVSTSMQIWREEVFGPVICVKVFKTESEAVELANDTHYGLAGGVISDDLERCERIAKVIHSGIVWINCSQPTLVQAPWGGNKRSGFGRELGEWGLENYLSVKQVTRYCKDELYGWYQRPSKL

SEQ ID NO: 10570 - protein, 385 aa, Neurospora crassa
MLSRNSMRLARAVAQPTPRLARGFASVQDTPAQTLQSDIFKPTKYGGKYTVTLIPGDGIGAEVAESVKTVFKADNVPITWEQIEVSGVQDNASRTEEAFQQAVASLRRNKLGLKGILHTPISRSGHQSFNVAMRQELDIYASISLVKNLPGLQTRHKDVDLCIIRENTEGEYSGLEHQSVDGVVESLKIITRAKSERITKFAFQFALANQRKKVTCIHKANIMKLADGLFRGTFNRLAKDFPQLECNDMIVDNASMQCVSKPQQFDVMVMPNLYGGILSNIAAALVGGPGVVPGCNMGRDVAVFEPGCRHVGLDIQGKDQANPTALLLSGTMLLRHLGLDDHANRISNAVYDVIAQGKVRTRDMGGEASTHEFTRAILDSMEKSL

SEQ ID NO: 10571 - protein, 274 aa, Listeria monocytogenes str. 4b F2365
MNLKYTVKLANGVEMPRLGFGVWKVQDGDEAVNSVKWAIEAGYISIDTAAAYKNEEGVGQAIKESGVKREDLFVTTKLWNAEQGYESTLAAFDESLRKLELDYVDLYLIHWPVKGKFKDTWRAFEKLYKDKRVRAIGVCNFHEHHLKELMEDAEIAPMVNQIELHPQLTQEPLRKFCAENNIVVEAWSPLGNGKLLSNPEIKAIADAHGKSVAQVILRWDLQIGVVTIPKSVHQERIIQNADIFDFELSEEEVAKISGLNKDERTGPDPDNFNF

SEQ ID NO: 10572 - protein, 493 aa, Catharanthus roseus
MDYLTIILTLLFALTLYEAFSYLSRRTKNLPPGPSPLPFIGSLHLLGDQPHKSLAKLSKKHGPIMSLKLGQITTIVISSSTMAKEVLQKQDLAFSSRSVPNALHAHNQFKFSVVWLPVASRWRSLRKVLNSNIFSGNRLDANQHLRTRKVQELIAYCRKNSQSGEAVDVGRAAFRTSLNLLSNLIFSKDLTDPYSDSAKEFKDLVWNIMVEAGKPNLVDFFPLLEKVDPQGIRHRMTIHFGEVLKLFGGLVNERLEQRRSKGEKNDVLDVLLTTSQESPEEIDRTHIERMCLDLFVAGTDTTSSTLEWAMSEMLKNPDKMKKTQDELAQVIGRGKTIEESDINRLPYLRCVMKETLRIHPPVPFLIPRKVEQSVEVCGYNVPKGSQVLVNAWAIGRDETVWDDALAFKPERFMESELDIRGRDFELIPFGAGRRICPGLPLALRTVPLMLGSLLNSFNWKLEGGMAPKDLDMEEKFGITLQKAHPLRAVPSTL

SEQ ID NO: 10573 - protein, 502 aa, Triticum aestivum
  misc_feature (121)..(121): Xaa can be any naturally occurring amino acid
  misc_feature (249)..(249): Xaa can be any naturally occurring amino acid
MVATAKIPQRQLFIDGDWRAPALGRRLPVINPTTEASIGEIPAGTSEDMDAAVAAARAALKRNRGRDWSRAPGAVRAKYLRAIAAKMIERKSDLARLEALDCGKPLDEAAWDMDDVAGCFXFFAGHAEALDKRQNAAVALPENFKCHLKKEPIGVVALITPWNYPLLMAVWKVAPALAAGCTAVLKPSELASVTCLELGDVCKEIGLPSGVLNIVTGLGNEAGAPLSSHPDVDKVAFTGSYATGQKIMXAAAPTVKPVTLELGGKSPIVVFDDVDIDKAVEWTLFGCFWTNGQICSATSRLLIHKNIAKEFVDRMVAWSKNIKVSDPLEEGCRLGPVVSEGQYEKIKKFVANAKSEGATILTGGVRPKHLEKGFFIEPTIITDINTSMEIWREEVFGPVLCVKEFSTEEEAIELANDTHYGLAGAVISGDRERCQRLAEEIDAGCIWVNCSQPCFCQAPWGGNKRSGFGRELGEGGIDNYLSIKQVTEYTSDAPWGWYKAPA

SEQ ID NO: 10574 - protein, 594 aa, Triticum aestivum
  misc_feature (517)..(517): Xaa can be any naturally occurring amino acid
PRVRFNHLYDPLSLVRDHRVKQVLGAEGITVQSFNSDLLYEPWEVLDDHGCPFTMFTPFWNTCLCMVDPPAPMLPPKRINSGELSRCCSSDDLIFEDESERGSNALLARAWSPGWQNADKAFTAFINGPLIDYSVNRKKADSANTSLLSPYLHFGELSVRKVFHQVRMKQLTWSNESNGDGEEGCSLFLRSIGLREYSRYLAFNHPCSHEKPLLAHLRFFPWVVNEVYFKVWRQGRTGYPLVDAGMRELWATGWLHDRIRVVVSSFFVKVLQLPWRWGMKYFWDTLLDADLESDALGWQYISGSLPDGRELDRIDNPQFEGYKFDPYGEYVRRWLPELARLPTEWIHHPWDAPESVLQAAGIELGSNYPLPIVELDEAKSRLQDALSEMWELEAASRAEIENGMEEGLGDSSDEPPIAFPQELQHMEVDLDRATIHTPAMAGRRRADQMVPSITSSFFRAETETELSAAFESQVTRPEVPSQVHFQPQTRTEIRDEVASYGTAARYNGVQQQQQQYXYTITVCRCGIAPSTSEASSSWTGREGGVVPAWAPPAASGHSDPYAADETDISGRSYLDRHPQQSHRLMNWNQLSQSS

SEQ ID NO: 10575 - protein, 46 aa, Aeromonas hydrophila
EKGFGFISPTDGSKDVFVHFSAIQTPGFKTLDEGQRVEFTIEQGQK

SEQ ID NO: 10576 - protein, 426 aa, Glycine max
MSEKEKGNNSEGQSTLLHGKYELGRVLGHGTFAKVYHARNLNTGQHVAMKVVGKEKVIKVGMMEQVKREISVMKMVKHQNIVELHEVMASKSKIYIAMELVRGGELFNKVSKGRLKEDVARLYFQQLISAVDFCHSRGVYHRDLKPENLLLDEHGNLKVSDFGLTAFSDHLKEDGLLHTTCGTPAYVSPEVIAKKGYDGAKADIWSCGVILYVLLAGFLPFQDDNLVAMYKKIHRGDFKCPPWFSLDARKLVTKLLDPNPNTRISISKVMESSWFKKPVPRKLAAEKVDLEEEKIESQLETINAFHIISLSEGFNLSPLFEDKRREEMRFATAGTPSTVISRLEEVAKAGKFDVRSSETKVRLQGQERGRKGKLAIAADIYAVTPSFMVVEVKKDNGDTLEYNQFCSKQLRPALKDIFWNSAPASA

SEQ ID NO: 10577 - protein, 431 aa, Arabidopsis thaliana
MAEDSNSSESIIVNVTGDDNKSALFGKYDLGKLLGSGAFAKVYQAEDLQNGGESVAIKVVQKKRLKDGLTAHVKREISVMRRLRHPHIVLLSEVLATKTKIYFVMELAKGGELFSRVTSNRFTESLSRKYFRQLISAVRYCHARGVFHRDLKPENLLLDENRDLKVSDFGLSAMKEQIHPDGMLHTLCGTPAYVAPELLLKKGYDGSKADIWSCGVVLFLLNAGYLPFRDPNIMGLYRKIHKAQYKLPDWTSSDLRKLLRRLLEPNPELRITVEEILKDPWFNHGVDPSEIIGIQADDYDLEENGKILNAFDLISSASSSNLSGLFGNFVTPDHCDQFVSDESTAVIMRKVEEVAKQLNLRIAKKKERAIKLEGPHGVANVVVKVRRLTNELVMVEMKNKQRDVGLVWADALRQKLRRLINQPVYKVPDKP

SEQ ID NO: 10578 - protein, 220 aa, Zea mays
  misc_feature (77)..(77): Xaa can be any naturally occurring amino acid
  misc_feature (98)..(98): Xaa can be any naturally occurring amino acid
  misc_feature (112)..(112): Xaa can be any naturally occurring amino acid
  misc_feature (132)..(132): Xaa can be any naturally occurring amino acid
MSATSKAAIREMDARMFGLENPLVAALHHLLDVPHTPRITIRNELIPNQHSKSATSKAATREMDARMFGLETPRVAXALHHLLDVPDGDKAGGGATRXTYVRDARAMAATPXADVKELAGAYAFVVDMPGLXGTGDIRVQVEDERVLVISGERRREEREDAKYLRMERRMGKFMRKFVLPDNADVDKVAAVCRDGVLTVTVEKLPPPEPKKPKTIEIKVA

SEQ ID NO: 10579 - protein, 437 aa, Vibrio cholerae O1 biovar eltor str. N16961
MTLTRRQQIEALEKDWATNPRWKNVKRTYTAEEVVSLRGSVVPANTIAQRGADKLWELVNGSAKKGYVNCLGALTGGQAVQQAKAGIEAIYLSGWQVAADNNTAGTMYPDQSLYPVDSVPSVVRRINNAFRRADQIQWSNGKSPQDEGGIDYFLPIVADAEAGFGGVLNAYELMKSMIEAGAAGVHFEDQLASVKKCGHMGGKVLVPTQEAVQKLIAARLAADVAGTTTLVIARTDANAADLLTSDSDPYDADFVTGERTSEGFYRVRAGIDQAISRGLAYAPYADLVWCETAKPDLEEARKFAEAIHAQYPDQLLAYNCSPSFNWEKNLDAKTIAHFQQALSDMGYKYQFITLAGIHNMWFNMFELAHAYAQGEGMRHYVEMVQRREFEAASKGYTFVAHQQEVGTGYFDKMTNTIQGGNSSVTALTGSTEEDQFH

SEQ ID NO: 10580 - protein, 159 aa, Listeria monocytogenes EGD-e
MNVHDFSEKAMNGKEIALSDYKGKVLLIVNTASKCGLTPQLEGLEAMYKKLGGDNFEILGFPCNQFLRQDPGSDEEILEFCQMNYGVTFQMFSKIKVKGKDASPLYKYLTEQTGGKKVEWNFAKFLIDENGEVIERFPSKMKPEDFEDKVEALVAKVNN

SEQ ID NO: 10581 - protein, 46 aa, Aeromonas salmonicida
EKGFGFISPADGSKDVFVHFSAIQSTSFKTLDEGQRVEFTIEQGQK

SEQ ID NO: 10582 - protein, 243 aa, Gossypium hirsutum
MRQQYVFTTLTLLILFSLSCSTTLAQAPALAPAPSGPTNVTKILEKAGQFTLFIRLLKSTQVANQLLGQLNNSNNGMTVFAPTDNAFSSLKSGTLNSLTDEQKVELVQFHIVPTYLTSSQFQTISNPLRTQAGDSGDGKFPLNITTSGNSVNITTGLTNTSVSGTIYTDGQLAVYQIDQVLQPLQIFAPRPPAPAPAPAKSKNKKATTVADSPDVTPADNSKAATLQNVGLFGVAALVIALSL

SEQ ID NO: 10583 - protein, 360 aa, Synechococcus elongatus PCC 6301
MAVRKLGVLTSGGDCPGLNAVIRAIARHAVGNYGWELWGIAYATQGLLKRQAIALSPHHFDRQSLDPLLCSGGTILGSINRGDTLAHQAEILAGYQELGLDALIGIGGDGSLAILRQLAEAGRWQFIGIPKTIDNDVALTERAIGFDTAIHTVAEALLSLGSTAASHDRIMIAEVMGRQSGHLALQGGIAGGADVILLPEIPYRLLELCHYLQQLRDRWQRRYAVIAIAEGTHHPPEVTQGPGSLGEQLVQAITAQDPTLDARVTVLGHVQRGGNPVASDRLLATQMGYAAVERLAAGASGEMMAWQGGRVVSVPLEAVCLQSPTLVDPHSPPVDTAAGLGIFLGDRSLTPWRGSACPTH

SEQ ID NO: 10584 - protein, 45 aa, Bacillus atrophaeus
KKGSGFIEREAGDDVFVHFSAIQGEGFKSLEEGESVSFDVEQGQR

SEQ ID NO: 10585 - protein, 40 aa, Brassica napus
  misc_feature (25)..(25): Xaa can be any naturally occurring amino acid
KLTAFVFARCVPHILITVNLIKDAXKFERGVEWPLALFGM

SEQ ID NO: 10586 - protein, 45 aa, Bacillus cereus
EKGFGFIEVEGGEDVFVHFSAIQGEGFKTLEEGQEVTFEVEQGNR

SEQ ID NO: 10587 - protein, 479 aa, Methanosarcina acetivorans C2A
MVAMKMQINGKAVEACGGEVFGIKNPATGELIEQVPRGTEEDVAVAVEAASSAFTGWASASPQQRGEVLYRAAEIVRQRKDELASLLTQEQGKPIVEARNEIEGFAHVLEYYCGLSGSQRGDFIPVPGNGYAFTVKKPLGVCAAIIPWNMPALIMGWKIAPVLISGNTLVLKPASNTPLTNLTLASIFVEAGLPAGVLNVVTGPGETVGESLVRSPEVRKISFTGEARTGKRVAELAACGMKRITLELGGSDPMLVCDDADLESAAAGALRGRFYNCGQTCTAVKRLYVFESVAEEFIKKLETGIKSLRLGNGMDKNISMGPLNNRTQWEYIKELAAEIEEKDAGRIITGGKVPEFKDSEKGYFFEPTLVSDVPGDSRLLKEEVFGPLLPVVTVKNLDEAIVGANSTCYGLGASIWTKNIDRARKGCEQLNAGIIWINQHLKVAPEVPFGGVKESGFGRENGPESLSEYLETKTIMLKI

SEQ ID NO: 10588 - protein, 375 aa, Triticum aestivum
MSRLLSPSDQQLQSPQQQFPEEQSYPQQPYPQQAFPIPQQYSPHQPQQPFPQPQRPTPLQSQQPFPQQPKQPQQSFSQPQQQFPLQPQQPFPQPQQPIPQQPRQPFPEQPQRPQQPQQSFPQPQQQFPLQPQQPFPQPQQPQQPFPQQPQRPQQSFPQQPEQIIPQQPQQPFPLQPQQQFPEQSEQIISQQRQQPFSLQPQQPFSQPQQPLSQQPGQIIPQQPQQPSPLQPQQPFPQQPEQIIPQQPQQPFLLQSQQPFHQQPEQIISQQPQQPFSLQPQQPFSQPQQPFPQQPGQIIPQQPQQPFPLQPQQPFPQQPQQPFPLQPQQSFPQQPQQPFPQPQQAFPEQGEQIIPQQPQQPFPLQPHQPQQPYPQQ

SEQ ID NO: 10589 - protein, 45 aa, Bacillus subtilis
EKGFGFIEVEGQDDVFVHFSAIQGEGFKTLEEGQAVSFEIVEGNR

SEQ ID NO: 10590 - protein, 324 aa, Aspergillus nidulans FGSC A4
MSSSLEQLKATGTVVVCDSGDFATIDKYKPQDATTNPSLILAASKKPEYASLIDAAVEKGKKQGGSVDDQVDATLDYLLVEFGKKILDIIPGKVSTEVDARFSFDTKASVDKALHIIKLYEEAGISKDRILIKIASTWEGIQAAHILQSQHGINCNLTLMFSLVQAIAAAEAGAFLISPFVGRILDWYKAAHKRDFSKEEDPGVKSVQSIFNYYKKFGYKTIVMGASFRNVGEITELAGCDYLTISPGLLEELYNSKDAVPKKLDAASATTLDITKRSYLNDEALFRFDFNEEAMAVEKLREGISKFAADAVTLKDILKQKVQA

SEQ ID NO: 10591 - protein, 82 aa, Glycine max
  misc_feature (14)..(14): Xaa can be any naturally occurring amino acid
ARDAIGVTSLYIGXGLYGSVWISSEMKGLHDDCGYFEVFLPGHLYSSKQIGCRRLYNPPWFSEAIPSALYEPLVSRHPFEQA

SEQ ID NO: 10592 - protein, 497 aa, Streptomyces avermitilis MA-4680
MHDFSRRGLLRATAAAGAGAVVLPGITAAEAPGASAATGTAESVKCKPAKLTGRIVRPDDPGYADASLGWDELFVHYPLVIVYAQETQDVVNALTWARQHDVALRVRSGGHSLEGWSNVDNGIVIDVSELKWAHIDTASRIATVGAGLSQLEAVTALAEKDLAVTTGTEGTVGLSGATLGGGFGFLTRYLGMACDSLIGAEVVVASGAECAKVIKADGKNNADLLWALRGAGNGNFGIVTSLTYKVAPLKSVAYLQATWDGLGDLQGVFDTWQRTAPVADNRLGTQLEIHRGEILLFGVLAEGSEAEAEELLAPILSVGNPQVSVQVGNWGDVYAGFQIPTADEPANWKFFSQFTTEPFPEKAISLIASFMQDAPSDDSNFFTQAFGGAVRRSPRGGTAFPHRDALFYSEPGAGWGTRGQAGSGDEITPQAQAWIAEFSQALRPYVNGAYVNVPNIGMQDWETAYWGSNFDRLRKIKAKYDPRNVFQYEQSIPPASC

SEQ ID NO: 10593 - protein, 180 aa, Pseudomonas aeruginosa UCBPP-PA14
MLLSALALAGLPLSGWAADCPELLQGQLTKLRSKESIDLCQRYAGKPLVVVNTASHCGFTPQFKGLEALYQRYKGQGLEVLGVPSDDFKQEAADTAETAKICYGNYGVTFAMTQPQHVRGDEAIPLFRQLAEQSGQAPRWNFYKYVVDRQGRVVAQFSSKTTPDDPQLQAAIEKAIASQP

SEQ ID NO: 10594 - protein, 253 aa, Brassica napus
  misc_feature (155)..(155): Xaa can be any naturally occurring amino acid
  misc_feature (192)..(193): Xaa can be any naturally occurring amino acid
  misc_feature (197)..(197): Xaa can be any naturally occurring amino acid
METLNPLSHVPISDHRFVGQDMMSLQSPSSIWTKEENKMFERALAIYPEDSPDRWFKIASMIPGKTVFDVMKQYSKLEEDVFDIEEGRVPIPGYPSPLGLAQDTYRKRPNGARGSDHDRKKGVPWTEEEHRRFLLGLLKYGKGDWRNISRNFVVXKTPTQVASHAQKYYQRQLSGAKDKRRPSIHDITTGNXXNANXNRSFSDHRDILPDLVFIEKDNAEGLMCMSPNLFSPSSAPFDDAFNFAGVNAFSAGA

SEQ ID NO: 10595 - protein, 437 aa, Glycine max
MEPPLQQKSPQPPPRTATILGKYQLTRFLGRGSFAKVYQGRSLVDGSAVAVKIIDKSKTVDAGMEPRIIREIDAMRRLHHHPNILKIHEVLATKTKIHLVVELAAGGELFAKISRRGKLPESTARRYFQQLVSALRFCHRNGVAHRDLKPQNLLLDGDGNLKVSDFGLSALPEQLKNGLLHTACGTPAYTAPEILRRSGGYDGSKADAWSCGLILFVFLAGHLPFDDTNIPAMCKKISRRDYQFPEWISKPARFVIHKLLDPNPETRISLESLFGNAWFKKSLNPETAEENALGLSYVKSSYNYEGSKKSSGVTAFDIISMSSGLDLTRLFETTSDLGSKREKRFSSSARVEVVEEKVKEVGGVLGFKIEVGKSNGAIALVKGKVALVFEVLEIVPHELLFVAVKVVEGALEFEEHHWGDWKDALQDLVLSWHNQES

SEQ ID NO: 10596 - protein, 1033 aa, Aspergillus nidulans FGSC A4
MDYRALWRRDGAEEFLKLIQDPFKSAFQTNAVWASLATSAVVAIVLALLFSLFRPRHTLVYAPKVKHADRKHAPPPVGKGLFAWIKPVIRTKEAELVDCVGLDATIFIRFTKMCRNIFIFLSIIGCGVMIPVNLTQSQNTDGATAFVVMTPLYVKVNAIWSQVVCAWAFNIIITFFLWRNYKAVLALRRRYFESSDYQRSLHARTLMITDIPPDLRTDEGFLRLTDELNPTAALPRSSVGRNVKGLPKLIKEHEELVRKLESVLAKYLKNPDRLPPSRPTMRPPRGHRDEDGSGKVDAIDYLTDRIQRLEEEIRHVRASIDKRNAMPYGFVSWDKIEHAHAVAYVARNKHPRGTTIRLATRPHDLIWENLSLSKSARKWKAFVMFLWVTALTVVWIAPNALIAVFLSNLSNLGSVWPAFQTELDRNRKVWAAVQGILSPAVTSLFYLLLPIIFRRLSARTGDATKTLREQHVLRHLYSFFVFNNLIVFSLFSAVWTFIAAVIDLKNKNEDPWQAVQDGQFYIKAFSAMCNVSPFWVTYLLQRNMGAAIDLVQFVHLIWVWFAKTFLAPTPRQTIEWTAPPAFDYASYYNYFLYYSTIAICFATLQPIVLPVTALYFGLDAMMKKYMLMYIFVTKNESGGQFWRVLFNRVVFAAILSNVIIGLVAKARGTWNMVYCVVPLPFLMLLFKWYCMRTFDDDCTYYNKANLSDTEALAASKSSKSAGDRLSSKFGHPALFKPLITPMVHAKAADALKQIYRGRLGGNEAEGDYSDIVMDPMMKSQPGKTMPDTSAPFEVVPEHHLDFAYYKDRADFQEEFGGGIYGRPEDLMTERSHTPRSALGDWSPTSSRAPSPAPSVPSLPMLQPEAYDPRLNQGMHPVFRPPPFRTGSGMSRGLYQHQNESETELLGQVQQPAGVSMQPWRPGGGYGPVDQDDHAFTSYEQYLVSIVPENYTLAVRQQPQAPGACLPITGLGRSLFPDNTRTTDSRSLGSPSATVARPELYDAVAISNSRCLYKPALCKLNQQPIRRCLVQHLN

SEQ ID NO: 10597 - protein, 298 aa, Triticum aestivum
  misc_feature (261)..(261): Xaa can be any naturally occurring amino acid
  misc_feature (264)..(264): Xaa can be any naturally occurring amino acid
MADDGLDRWRGFFQGAGVGICEAIEKAILVAAADEPQEFLRRRDRIAERLFNALLARPSCHGCTASTGSVPPATPAVAEDKGSVRRVPEKESKVDSSSLGAPGGGALGGGISEDEDSDSEDDERLRRAAASNYGHNYDDDNDVEEEQDAAAPAEEDHHAEDDDPEAEELEALTNEIDEESQIVGEVLRIKELLLHKQDHSDATLFDSLRRLQLMQLSVSTLKATEIGRAVNGLRKHSSQQIRHLALALIQDWKILVDEWVXTTXLPAKIPGLTLCVIDKKKPPPPWVGLLAQNAKLFF

SEQ ID NO: 10598 - protein, 1424 aa, Magnaporthe grisea 70-15
MGASDSKLVFKKGIFRLSEERHIPADDSYWTSFWELPESSEDVFSLFAPADIRRTRDNALENLETLILAITSRLFTLRHHPSFPDAEIAPDREALNCIRVLTRILPYLYELESLQAWEDRFFWGTRRKRTRRAKLASEVLFDGSQPTSPTTTDGGFDDGGGNGGGNGDNKKPKAAGDDGYEDARPLGAELIDTLIDLLFLTEFTVPRQAVPAGAAAAGRPKVSYAIWQSGVGCNQTTQTTREFESNRTEILRLLLTLCSQSMYMSANVLPQRGVKALTHICTCPDKQVVLSMLCSLLNTLLLVVILYPVPDNANGQAQKNYYRHFLGRIHRPQDFQFIVDGMTRILNQPMQANPTSYIPGAVAQSSAATVKFAPETIMLFWETTQCNKRFRSFIIDTQRAHDFVISVLFYAIEFKGDSSRQGVVRMCAFLLQTLSMEKNFGINLNKSFEAQDTLPPAIRIPAFRGTYADFLIQSIYNLITTSKGKLSAIYPVLLAVINNIAPYLQGINATTSSRLLQLFASMSSPSFLLANESNHDLLRSLLEAMNTIIEHQYKKYQQPNYNAFQGIFNQPGAPAGNEEDNTFAIGDDDDSDDEARPTPAQSDVPSRSSSVASTTNRRGIPQSVDGDAEDALPTQLRGMSEKARGKMPAGYSFSRQNSTTSLGGSSVAGSAAGMAASASSPFLSGGPGGYFEPTAQWIDSWLPELPLHTLLTLIQQLTALLPRQVLAPEASAATDPRGHEQVLSRIRSTELVGIDTDAAHPRVHLFEWSQLALGWYESLVWSFVFSAELQAARGTAGIWNGTAIRLFRVVQDAQAPQGPSLSSPRGAVDAVGSNLVSRIGAINLRGAAESLGRASAGGNAGGGASEGAARRGSVERFFGDVFDIMEAWYSCALLKPPLLRNTWPRTCYGGAQVTATGLTVQAPESCNRHLKTSGVIMRATCESIAQGTILHRLNGDHTASVGCTGNRLCEAAFCSQPSQRIVPTTCASLYAVLAEPPSTPSQFGTFSFVVAQDLEATVGNCPAMLQSAMATMILEASYKCLSVKETANALPSKSDECTCISCHFAAAARFNPAALSTQKEPARRTSSPRQASLESQIREFLHAKKPREQGAGKEPLEQLQAAQAAAAAAALVAQPSAQPVAMHLGMFEIGKPLGRGKFGRVYLAREREHGFVCALKVLHKRELQDAHVERQVQREIEIQSNLRHPNILKMYGHFHDSKRIFIILEFAGKGELYKHLRKETRFPEWRAAQCIAQMASALRYLHRKHVMHRDIKPENILVGFYGEIKISDFGWSVHAPSDRRTTFCGTLDYLPPEMIKPRTADKSYDHRVDLWALGVLTYELLVGEAPFEDTPAMTHKKITRRDMKVPSFVSREASDLILKLLVVDPNKRLPLDKVLDHPWIVKHCRNQKASDRLLPSTGNTPPED

SEQ ID NO: 10599 - protein, 580 aa, Glycine max
MATPNPTRFSLAMERTGQWVFSPEIPTDVIVAVGQTNFSLHKFILAAKSNYVRKVIMESEESDLTRIEISDIPGGSEAFEKAAKFCYGVNFEITVHNVAALHCAAVFLQMTDEYCDGNLAGRTEDFLSQVGLSTLHSAVAVLKSCQKILPFAAEVNVVDRCVEVISCKACNEANFPSQSPPNWWTEELAVLDVDSFAKVIAAMKQRGAKYLTVAGALITYTERALRELVRDHSGGGRGIRSPESGDSDSESKRSEQRELLQAIVPLFPTEKAAFPINFLCCLLRCAIYLRASSACKRELEKRVTEILEHVTVDDLLVLTFSYDGERLLDLDSVRRIISGFVEREKGTTVFNAGVNFNEDFSAAMQRVAKTVDSYLAEIAAYAELSISKFNGIAILIPKGARKSDDDLYRAVDIYLKVHPNLDEIEKEKVCSVLDTLKLSYEARVHASKNKRLPLQIVLHALYYDQLQIRSGTAADKQAVVAAAEKKQLQADVSLVRENEELRSELMKMKMFISDLQKNVHGTSSSGRENIGPTKKPTFFSSMSKKLSKLNPFKNGSKDTSHIDDAPVDLTKPRKRRFSIS

SEQ ID NO: 10600 - protein, 385 aa, Bacillus halodurans C-125
MIRIFQTVLLAIVSAIVGFMIISITFVEYWSHTEAGKVPPKTAVLLHAIHHNLVTPDMRPPKFLTQSNGHSRFKTELIQIPVSDGASIPARVYQPKASGPHPIILYYHGGAFLEGYGDINTHDNIVRALAVRTGSIVVAVGYRVAPGHPFPTAIEDSYDALDWISKNAELFNGDPANVAVVGDSAGGNIATVVSLMARDREGPEISAQVLLYPLTTFQDVAFPSRDHYDSGYYLLSRAVMVQAREKYTPQQESWLNPYTSPLNADLEGVPPAFVVTAEFDPLRDEGEMYAQSLADAGVPVQAIRYNGVMHGFVSFYEVMERGDDALHQASMFLKKSFYDDMDAKPYELVIDDVPSAQVAIKDRLEAYAIGGFLIGKQSLSLFSGW

SEQ ID NO: 10601 - protein, 417 aa, Photorhabdus luminescens subsp. laumondii TTO1
MESKVVIPAEGKKITVDAKGKLVVPNNPVIPYIEGDGIGVDVTPAMLKVVDAAVQKAYQGERKISWMEIYTGEKSTHVYGKDVWLPDETLDLIREYRVAIKGPLTTPVGGGIRSLNVALRQQLDLYVCLRPVRYYQGTPSPVKQPELTDMVIFRENAEDIYAGIEWKAGSVEADKVIKFLQEEMGVNKIRFPQQCGIGVKPCSEEGTKRLVRAAIEYAIDNDRESVTLVHKGNIMKFTEGAFKDWGYQLAREEFGGELLDGGPWVKIKNPKNGKEIIVKDVIADAFLQQILLRPAEYDVIACMNLNGDYISDALAAQVGGIGIAPGANIGDECALFEATHGTAPKYAGQDKVNPGSVILSAEMMLRHMGWTEAADLIVKGMEGAIAAKTVTYDFERLMEGAKLLKCSEFGDAIIQHM

SEQ ID NO: 10602 - protein, 156 aa, Glycine max
  misc_feature (134)..(134): Xaa can be any naturally occurring amino acid
MGRGKIAIRRIDNSTSRQVTFSKRRNGLLKKARELSILCDAEVGLMVFSSTGKLYDYASTSMKAVIERYNKLKEEPHHLMNPASEAKFWQTEAASLRQQLQYLQECHRQLMGEELMGLGIKELQSLENQLEMSXKGVRMINDQIVTNEIEELRLNG

SEQ ID NO: 10603 - protein, 45 aa, Bacillus subtilis
EKGFGFIEVEGQDDVFVHFSAIQGEGFKTLEEGQSVSFEIVEGNR

SEQ ID NO: 10604 - protein, 448 aa, Thermoplasma acidophilum DSM 1728
MIMEDQERTERYNEDALRYSEYFKGKIQTISKVPVRSLDDFSIWYTPGVAAVSRKIASDPDLSFELTGRWNSIAILTDGTRVLGLGNIGPEAAMPVMEGKALIFNYLGGVNAIPIPIRVQSKEEFVKVAKALEPSFGGINLEDIESPKCFFLLETLQNEMNIPVWHDDQLGTASITLAGVINSLRIVGKKIDQVKVVFNGAGAANIAAAYLFKAAGFKMKNMILVDSKGILHPEREDIDALMINNPWKYQLAIETNGERVKGDLSNAIEGADLLISAAKSGPDTIDSRIVKKMNNDAIVFVLANPIPEMWPQEAKENGARIVATGRGDFPNQINNSLVFPGVFRGVLDARAKGVNFDVMVAASYEIANFVEDPTEEKIVPTMEEWELYPRLASAVASKTVELGLARKSDSKEGFYRRAREIIESNRNIYSKLMDLGLIKRMPNGEHKN

SEQ ID NO: 10605 - protein, 189 aa, Azorhizobium caulinodans
VYPKNDLDYASNFLNMCFAVPCEDYKVSPTLARALDKIFILHADHEQNASTSTVRLAGSSGANPFACIAAGIACLWGPAHGGANEAALKMLTEIGTPDRIPEFVNKAKDKNDPFRLMGFGHRVYKNYDPRAKIMQQTCHEVLTELGIKDDPLLDVAVELERVALHDEYFIEKKLYPNIDFYSGITLKAM

SEQ ID NO: 10606 - protein, 381 aa, Arabidopsis thaliana
MDRISGLPDELLLRVLSLLPNVKDVVVTMVLSKRWQFLWMMVPKLVYDDSYQNLEYGKFSRFVDRSLFMRKAPGIETLHFKLGQNCGNGDIQWWIRAASKFCFRELIIEINCSTSASPSILPRSLYTECRMLVTLKLKKAVLVDVSSPTCFPSLKNLSLVSVKYPGNEFVKSLLSSCHVLEDLVVEQCINDNVTIFSVKVPSLKSLVLRTSKERAPDGESGFVVEAPSLEYLDIDQTGGFCVIENGMPNLAEAYVSVLHHHPDMYPIRCVFHRLVHITLCTCDDEWLNLLACLLKGSPKLISLKLEKHHGHLICSPSPLRDDLSSVPECVLSSLETVEWVDYEGTEAERQLVEFILRNGSCLKKFVISPESVNPDKKYEMI

SEQ ID NO: 10607 - protein, 429 aa, Sinorhizobium meliloti
MSEKSATVTFGGKSADLPVRSGSIGPDVVDIGSLYKQTTMFTYDPGFTSTASCESKITYIDGDEGVLLHRGFPIEQLAEHGDFLEVCYLLLYGELPTKAQKADFDYRVTHHTMVHEQMSRFFTGFRRDAHPMAVMCGCVGALSAFYHDSTDITDPHQRMVASLRMIAKMPTIAAMAYKYHIGQPFVYPKNDLDYASNFLRMCFAVPCEDYVVNPVLARAMDRIFILHANHEQNASTSTVRLAGSSGANPFACIAAGIACLWGPAHGGANEAALNMLAEIGTADRIPEYIAKAKDKNDPFRLMGFGHRVYKNYDPRAKIMQKTTHEVLAELGHKDDPLLEVAMELERIALTDEYFVEKKLYPNIDFYSGITLKALGFPTTMFTVLFALARTVGWIAQWNEMIEDPEQRIGRPRQLYVGAPLRDYVPITKR

SEQ ID NO: 10608 - protein, 116 aa, Pinus pinaster
TVFTVILYGSPLSVIRLVIHTKSVEFMPSFYFSLFAFLGSVLWMVYGALSGDILIMAPNFVGIPLGLSQMALYCIYWNNSPVRVEATKLEAGGELKSIEQNIKEDIELYTEDIEKA

SEQ ID NO: 10609 - protein, 189 aa, Mesorhizobium huakuii
IYPKNDLGFAANFLHMCFAVPCEEYKINPVLARAMERIFILHADHEQNASTSTVRLAGSSGANPFACIAAGIACLWGPAHGGANEAALNMPGEIGHVDHIPEFIARAKDKNDPFRLMGFGHRVYKNYDPRAKIMQKTAHEVLGELGIKDDPLLDIAMELEKIALTDPYFIEKKLYPNVDFYSGITLKAL

SEQ ID NO: 10610 - protein, 71 aa, Triticum aestivum
MAHAAAAAAVPLRRPLLLYLRPARLLSSVAPRSMYGRAYTRALRPLAPLPSDDEDPDDGDGAPSRNEKKRK

SEQ ID NO: 10611 - protein, 171 aa, Hyacinthus orientalis
MKGTYQCSHSELSWSNVGEYQQQLVGHGELLLLRLHRHRVPATFSLSNVGTFIQMRTNLKVVDNSGAKRVMCIQSLKGKKGARLGDTIIASVKEAQPKGKVKKGDVVYGVVVRAAMPRGRCDGSEIKFDDNAVVLVNKQGEPIGTRVFGPVPHELRKKKHVKILTLAEHIA

SEQ ID NO: 10612 - protein, 334 aa, Pantoea agglomerans
NGIAGSYAEYVPVVHIVGAPRLTSQRKGELLHHTLGDGEFCHFMRMSAPVSVAQASLTPENALAEIDRVIEEVMYSSRPGYLLLPSDVPALPVSTRAHALPARQPPFSPSSLEAFTAAAQTQLRGANRVSLLADFLADRFKVKKALEQWMEEVPLGTSTLLMGKGLFNEQQAHFAGTYSGAASAPSTKEAIEGADVVITVGVKFTDTITAGFYQQRPSGNASTSALFAARAIRSSITGRSKNGQRDAPPPPLNLAFRPGRLILLNTTHCRWSRDNSLGQYAFWQQIQDSLQPGDVLVAEQGTACFAAAALNLPQDLQFVVQPLWGSIGYTLAAA

SEQ ID NO: 10613 - protein, 448 aa, Zea mays
MERARARAPALALAPVEVPKFFVCPISLEVMRDPVTLSSGITYDRDSIERWLFTDGHGDCPVTKLPLGADDLEPTPNHTLRRLIQSWCAAHAVERFPTPRPPVDADRVAAIVGCAKKGGQQEVLAALRELADIIGESDRNRRCVEGVPEAVEFLVSVVKKHAAGTSSSKPLGGCRSQEEPMCGVPDSPKACSPEEAALSILHSLKLSEASLKRALESSDGFVDTLASVLRWPPNYRARTYAMHLLKAALSAMQPSQLSSASTDLVEGVVRVVADRTLSPKAIKVALHVLCRLCPWGRNRVKAVEAGAVAAVVELLLNEGCGCGGSNGKRAVELAVVAIDHLCGCAEGRLELVAHPAGLAVVARAATRLSPTATESAVRALHAVARHSATPAVLQEMLAVGVVARLLYLVQAGASGERPRERAREMLKMHARVWRGSPCLASHMASYPC

SEQ ID NO: 10614 - protein, 235 aa, Zea mays
  misc_feature (138)..(138): Xaa can be any naturally occurring amino acid
SAGKFRKGSTGSEQAIRRRRQWQQQGASPVLLLLLTVQLSLLFRLPDSPSTLALALAAEPEQQNAKQHRQPALLVQSTCNSTSFYDLCIAALAADPASSTADVPGLGAIAVSAAANNASGTAAFLGNASDAAATPQAXRALLRACAGKYAAARDALVQARASLAEQAYDYAFVHVSAAGEYPAVCRTLFRRRQQQQRGASRSAYPAELAKREEALRRLCTIALDIISLLQNQETY

SEQ ID NO: 10615 - protein, 145 aa, Triticum aestivum
  misc_feature (15)..(15): Xaa can be any naturally occurring amino acid
  misc_feature (89)..(89): Xaa can be any naturally occurring amino acid
MASSMISSPAVTTVXNRAGAGMVAPFTGLKSMAGFPTRKTNNDITSIASNGGRVQCMQVWPPVGKKKFETLSYLPDLDDAQLAKEVEYXLRKGWIPCLEFELEHGFVYREHNRSPGYYDGRYWTMWKLPMFGCTDASQVLKELQE

SEQ ID NO: 10616 - protein, 333 aa, Methanocaldococcus jannaschii DSM 2661
MHKICVIEGDGIGKEVVPATIQVLEATGLPFEFVYAEAGDEVYKRTGKALPEETIETALDCDAVLFGAAGETAADVIVKLRHILDTYANIRPVKAYKGVKCLRPDIDYVIVRENTEGLYKGIEAEIDEGITIATRVITEKACERIFRFAFNLARERKKMGKEGKVTCAHKANVLKLTDGLFKKIFYKVAEEYDDIKAEDYYIDAMNMYIITKPQVFDVVVTSNLFGDILSDGAAGTVGGLGLAPSANIGDEHGLFEPVHGSAPDIAGKKIANPTATILSAVLMLRYLGEYEAADKVEKALEEVLALGLTTPDLGGNLNTFEMAEEVAKRVREE

SEQ ID NO: 10617 - protein, 404 aa, Prunus persica
YQGVYPVKCNQDRFVVEDIVRFGSPFRFGLEAGSKPELLLAMSCLCKGNPEALLICNGFKDFEYISLALFARKLALNTVIVLEQEEELDVVIDLSKKLGVRPVIGARAKLKTKHSGHFGSTSGEKGKFGLTTTQILRVVKKLDQLGLLDCFQLLHFHIGSQIPSTALLADGVSEAAQIYCELVRLGAHMKFIDIGGGLGIDYDGSKSSDSEISVSYSLEEYAAAVVRAVLNVCDRKSVKHPVICSESGRALVSHHSVMIFEAISSSACDDVPPMSAFALQYFIEGLTEEARADYRNLSAAAIRGEYEACLTYADQLKQRCIDQFKEGSLGIEQLATVDGLCDMVSKAIGASDPVRTYHVNLSVFTSIPDFWGIGQTFPIVPIHRLDQRPAVRGILSDLTCDSDG

SEQ ID NO: 10618 - protein, 367 aa, Caulobacter crescentus CB15
MKSLFQRRASKVRETEAMNAPVPNNQKAELLQKVVEHVDITSYDARPIIDSMRKMSFSSRDTARAADIFNMALADKGCSTWLILAGSTSAGGCMHVYRDMVKNGMIDAVVATGASIVDMDFFEALGFKHYQAAGPVDDNVLRDNYIDRIYDTYIDEEELQACDHTILEICNKLEPRGYSSREFIWEMGKWLAEGNAKKEGSLIQTAYEEGVPIFCPAFVDSSAGFGLVKHQKEKIAEKKPYLMIDAVADFRELTDVKIAAGTTGLFMVGGGVPKNFAQDTVVCAEILGVEADMHKYAIQITVADVRDGACSSSTLKEAASWGKVSTTYEQMVFAEATTVVPLIASDAYWRKAWEGREKPRWNKLFGK

SEQ ID NO: 10619 - protein, 73 aa, Glycine max
MLCTANNNDSTFKRVLKECAESYKYARDALHAPAQDSANDAYDYASMHMIVAYEYSNVWHSLFKLYSGVGDPC

SEQ ID NO: 10620 - protein, 158 aa, Ustilago maydis 521
MVSLTTSDNEQFTVDRDVAERSVLIKQMLEDIGDTEQPIPLVNVSSNVLKKVLEYCSHHRNDPPAPADDAEESRRRTTDISDWDAKFIQVDQEMLFEIILAANYLDIKPLLDVGCKTVANMIKGKTTEEIRKLFNIQNDFSPEEEAQIRKENEWAEDR

SEQ ID NO: 10621 - protein, 519 aa, Zea mays
SARGNYGLEAGSKPELLIAMSCLPVTEAEPKPYLICNGYKDADYIALALSARAMGLNPIIVLEMEEELAIVLDQYRKLQQKLPDDDAVRKKFEPIIGIRAKLLTKLPGHFGSTAGKHGKFGMLADQIYEVAETLGKEGKLHWLQLLHFHIGSMIPTTGKVYDAVSEAAGIYCNLVNEHGAKWLATLDCGGGLGVDYDGTRSGDSDMSVAYGIQEYASAVVQAVRLKCDYNGVAHPVVCTESGRAMASHHSMIILETLSAIPEPQDEDTSEQLLNRIQDLSYKQPRAPVGGATAAVYSHAADLKKHGIEMYKLGKKLGKRVVADANTVYNYHMNLSVFSLLPDFWGIGQLFPMMPVSRLNEEPTLKGTLVDITCDSDGKIENFISRENTLPLHLFEPSLGGYYVAVLVSGAYQEAIAGKHNLFSGPTLVRVNSSTTKDGGFEIERVDLGPAADEIIGSMRYSVEEDIITVIEKKAKGTEEEERVWAWEMVEPLMTKALTTMPYLNEYKVPEPEPEPEPIP

SEQ ID NO: 10622 - protein, 426 aa, Thermus aquaticus
MAYQRIQIPQEGEKITIQEGVLKVPDQPIIGFIEGDGTGPDIWRAAQPVLDAAVAKAYGGQRRIVWVELYAGEKANQVYGEPIWLPEETLEFIREYLVAIKGPLTTPVGGGIRSINVALRQELDLYACVRPVRWFQGVPSPVKHPELVNMVIFRENTEDIYAGIEWPAGSEEVKKVLDFLKREFPKAYAKIRFPETSGLGLKPISKEGTERLVEAAIEYAIKEDLPSVTLVHKGNIMKFTEGAFREWGYALAREKYGATPLDGGPWHVLKNPRTGREIVIKDMIADNFLQQILLRPDEYSVIATMNLNGDYISDALAAQVGGIGIAPGANINYKTGHAVFEATHGTAPKYAGQDKVNPSSVILSGEMMLRYLGWNEAADLIIRAMERTISKGLVTYDFHRLLVAEGKPATLLKTSEFGQALIQHMD

SEQ ID NO: 10623 - protein, 238 aa, Avena sativa
IENKISRQVTFAKRRNGLLKKAYELSLLCDAEDALIIFSGRGRLFEFSSSSCMYKTLERYRTCNYNSQEAAPLVENEINYREYLKLKTRVEFLQSSQRNILGEDLGPLSMKELDQIESQIDVSLKHIRSRKNQVLLDQLFDLKSKEQELQDQNKDLRKKLQEMSCGENAVHMSWQDGGGQSSSSGQAVDPYPGPLQHPEHDSSMQIGYHQTYMEQLBNEDHTASHHPNAQPGSSAGWI

SEQ ID NO: 10624 - protein, 332 aa, Gonyaulax polyedra
MAGPQLDDFTLVKVLGKGSYGKVMLVRGAQDNRLYAMKMLRKENVIKRNQVEHTKTERSVLETVSHPFIVTLHYAFQTPKKLYMVMEYCPGGELFFHLSRAGRFSEGRTRFYVAETSSAVAYLHQLNVIYRDLKPENLLIDGEGHAKITDFGLRKEGIQDNHSAMTMCGTPEYLAPEILDKKGHGKAVDWYSVGALTYEMLTGLPPFYTKDLQKLFDRIRRGELTYPDYVSVLAKEFLRALLQRNPDARLAGGVPGGDEVKGHEFFGGLDWVALEKRAIPPPFKPTFGGQKEDDVVKYFEKDFVGQPVVNSEVGEGGRDLGHLEASTLTGKR

SEQ ID NO: 10625 - protein, 445 aa, Bacillus halodurans C-125
MAKDESYLIKPLLDRNYPCVSYGKGAALYDMDGKRYLDACSGAVTASIGHGVDEVVQAMYEQARKVSFVYRSQFTNEPAERLAMKLAEQLPGQLNHSFFVNSGSEATETAIKISIQYWQERGRPEKTLILSRWMSYHGITQGALSLSGHYERRQRFEGMLDRLPFLSPPYPYRQVREMSGVDYAEELDHLIEQIGPHRIAAFIAEPIVGAAGTALVPGEWYYEALKQVLDQHDILFICDEVMTGMGRTGKDLAIEHWDATPDIVTLGKGLSAGYAPLAATVVADHVLEPIQAGSNLIMSGHTFSANPLSCAAGLAVLHYVKKHDLVKRAATIGEKLIEDLQEIQTASAIVGDVRGKGLLIGLEFVKNKATKAPFPKDAQVAAVIVNEAQRQGLLLYPSAAGLKGEGAGCLIAPPFTLTKEERCELLGKLARTLERVEKQLLGAEK

SEQ ID NO: 10626 - protein, 251 aa, Oryza sativa (japonica cultivar-group)
MGSKSYPTVSDEYLAAVGKAKRKLRGLIAEKNCAPLMLRLAWHSAGTFDVSSRTGGPFGTMKNPGEQSHAANAGLDIAVRLLDPIKDQLPILSYADFYQLAGVVAVEVTGGPEVPFHPGRQDKPEPPPEGRLPDATQGSDHLRQVFSAQMGLSDKDIVALSGGHTLGRCHKERSGFEGAWTSNPLIFDNSYFTELVSGEKEGLLQLPSDKALMADPAFRPLVEKYAADEDAFFADYAEAHLKLSELGFAEE

SEQ ID NO: 10627 - protein, 222 aa, Chasmanthium latifolium
IENKISRQVTFAKRRNGLLKKAYELSLLCDAEVALIIFSGRGRLFEFSSSSCMYKTLERYRSSNYNSQEVKAPLDSEINYQEYLKLRTRVEFLQTTQRNILGEDLGPLSMKELEQLENQIEISLKHIRTRKSQVLLDQLFDLKTKEQELEDISKGLRKKLHETSGENALHISWEEGGHSGASGNAVEPYQGFQQHRENESSLQIGYRQQAYMEQLNNEDMED

SEQ ID NO: 10628 - protein, 342 aa, Streptomyces coelicolor A3(2)
MKALVKENAEPGLWLADVPEPTIGSGDVLIKVLRTGICGTDLHIRAWDGWAQQAIRTPLVVGHEFVGEVVDTGRDVTDIKAGDRVSGEGHLVCGKCRNCLAGRRHLCRATVGLGVGRDGAFAEYVALPASNVWVHRVPVDLDVAAIFDPFGNAVHTALSFPLVGEDVLITGAGPIGLMAAAVARHAGARNVVITDVSEERLELARKVGATLALNVSDATIADGQRELGLREGFDIGLEMSGRPEAMRDMIANMTHGGRIAMLGLPAEEFPVDWARVVTSMITVKGIYGREMFETWYAMSVLLEGGLDLAPVITGRYSHRDFEAAFADAASGRGGKVILDWTA

SEQ ID NO: 10629 - protein, 225 aa, Danthonia spicata
IENKISRQVTFAKRRNGLLKKAYELSLLCDAEVALIIFSGRGRLFEFSSSSCMYKTLERYRTCNFNSQEAKAPLDSEINYQEYLKLKTRVEFLQTTQRNILGEDLGPLSSKELEQLENQIEISLKHIRTRKNQALLDQLFDLKSKEQELQDLNKDLRKKLQETSGENAVHISWEEGGHSGASGNAMEPSQGFLQHPENDSDLHMGYHQQAYMDHLNNEDMAAPHH

SEQ ID NO: 10630 - protein, 281 aa, Pyrococcus furiosus DSM 3638
MERAFIEWYPRGYGVAFKIKKKIYEKLSKYQKIEVYETEGFGRLLALDGTVQLVTLGERSYHEPLVHPAMLAHPKPKRVLVIGGGDGGTVREVLQHDVDEVIMVEIDEDVIMVSKDLIKIDNGLLEAMLNGKHEKAKLTIGDGFEFIKNNRGFDVIIADSTDPVGPAKVLFSEEFYRYVYDALNNPGIYVTQAGSVYLFTDELISAYKEMKKVFDRVYYYSFPVIGYASPWAFLVGVKGDIDFTKIDRERAKKLQLEYYDPLMHETLFQMPKYIRETLQRL

SEQ ID NO: 10631 - protein, 73 aa, Triticum aestivum
MAFPACVQFGTRENPCRCKFIGPTLGFVAFLVTGVIEWPVGAVVYLFRHRKGRRIMGHPSRVVYPRVSRAIPI

SEQ ID NO: 10632 - protein, 225 aa, Ehrharta erecta
IENKISRQVTFAKRRNGLLKKAYELSLLCDAEVALIIFSGRGRLFEFSSSSCMYKTLERYRSCNYNSQEAAPENEINYQEYLKLKTRVEFLRTTQRNILGEDLGPLSMKELEQLENQIVVSLKQIRDKKNQALLDQLFELKSKEQELRDLNKDLRKKLQETTGDNVLHMSWQDGGGQHSGSSGLTAEHHQGLLHHQDQGNHSLQIGYHQAYMDHLNNEAEMAGHN

SEQ ID NO: 10633 - protein, 166 aa, Brassica napus
  misc_feature (11)..(11): Xaa can be any naturally occurring amino acid
  misc_feature (19)..(19): Xaa can be any naturally occurring amino acid
  misc_feature (21)..(21): Xaa can be any naturally occurring amino acid
  misc_feature (31)..(31): Xaa can be any naturally occurring amino acid
  misc_feature (36)..(36): Xaa can be any naturally occurring amino acid
  misc_feature (39)..(40): Xaa can be any naturally occurring amino acid
  misc_feature (42)..(42): Xaa can be any naturally occurring amino acid
  misc_feature (45)..(45): Xaa can be any naturally occurring amino acid
  misc_feature (48)..(48): Xaa can be any naturally occurring amino acid
  misc_feature (51)..(51): Xaa can be any naturally occurring amino acid
  misc_feature (55)..(55): Xaa can be any naturally occurring amino acid
  misc_feature (60)..(60): Xaa can be any naturally occurring amino acid
  misc_feature (63)..(63): Xaa can be any naturally occurring amino acid
  misc_feature (67)..(69): Xaa can be any naturally occurring amino acid
  misc_feature (75)..(76): Xaa can be any naturally occurring amino acid
  misc_feature (88)..(89): Xaa can be any naturally occurring amino acid
  misc_feature (91)..(93): Xaa can be any naturally occurring amino acid
  misc_feature (95)..(96): Xaa can be any naturally occurring amino acid
  misc_feature (100)..(102): Xaa can be any naturally occurring amino acid
  misc_feature (105)..(107): Xaa can be any naturally occurring amino acid
  misc_feature (115)..(115): Xaa can be any naturally occurring amino acid
  misc_feature (119)..(120): Xaa can be any naturally occurring amino acid
  misc_feature (139)..(139): Xaa can be any naturally occurring amino acid
  misc_feature (147)..(148): Xaa can be any naturally occurring amino acid
  misc_feature (151)..(151): Xaa can be any naturally occurring amino acid
  misc_feature (153)..(153): Xaa can be any naturally occurring amino acid
  misc_feature (155)..(156): Xaa can be any naturally occurring amino acid
  misc_feature (159)..(163): Xaa can be any naturally occurring amino acid
SEKKKKKKSVXASSMLSSXAXVTSPAHATMXAPFTXLKXXAXFPXTRXANXDITXIASNXGRXSCMXXXPPVGKXXVETLSYLPDLTXXEXXXEXXYLLXXXWIXXXEVELEHGXVYRXXGSTPVYYDGRYWTMWKLPXFGCTDSAXXLKXAXNXXGEXXXXXRDI

SEQ ID NO: 10634 - protein, 451 aa, Zea mays
MVGGGGGGPLRRVGKYEVGRTIEEGTFAKVKFAQNTETGESVAMKVLDRSSILKNKMAEQIKREISIMKLVRHPNVVRLHEVLASRKKIFIILEFITGGELFDKIIRHGRLSEADARRYFQQLIDGVDFCHKKGVYHRDLKPENLLLDSQGNLKISDFGLSAWPAQGSFLLRTTCGTPNYVAPEVLSHKGYNGALADTWSCGVILYVLLAGYLPFDEVDLTTLYGKIESAEYSFPAWFSGGAKSLIRRILDPNPETRIRIEEIRSDEWFQKNYEPIKEIENEEVNLDDVNAAFDDPEDDNEDAFEDETGPLTLNAFDLIILSQGLNLAALFDRRQDCDKLQNRFLSRNPAKVILSSMEVVAQSMGFKTHIRNYKMRVEGLNADKTSHLSVMVEVFEVAPSIFMVELQRAAGDTSEYNTFVNNYCSKLDDIIWKFPTEKGKSRIPRLSKSHS

SEQ ID NO: 10635 - protein, 280 aa, Thermus thermophilus
MAAKKDYYAILGVPRNATQEEIKRAYKRLARQYHPDVNKSPEAEEKFKEINEAYAVLSDPEKRRIYDTYGTTEAPPPPPPGGYDFSGFDVEDFSEFFQELFGPGLFGGFGRRSRKGRDLRAELPLTLEKAFHGGERVVEVAGRRVSVRIPPGVREGSVIRVPGMGGQGNPPGDLLLVVRLLPHPVFRLEGQDLYATLDVPAPIAVVGGKVRAMTLEGPVEVAVPPRTQAGRKLRLKGKGFPGPAGRGDLYLEVRITIPERLTPEEEALWKKLAEAYYARA

SEQ ID NO: 10636 - protein, 229 aa, Eleusine coracana
LENKISRQVTFAKRRNGLLKKAYELSLLCDAEVALIIFSAGRGRLFEFSSSSCMYKTLERYRTCNFNSHEVKAPLDSKINYQDYLKLKTRVEFLQTTQRNILGEDLGPLSNKELEQLEKQIEISLTQIRSRKNQMLLVQLLDLKSKEQELQDLNKDLRKKCQLKKTCGENATHISWEEGGHSGTSRNANEPNQGFLQHAENNYSSLQIGYYQQAYMDQLNNQDIGAAHN

SEQ ID NO: 10637 - protein, 391 aa, Streptococcus salivarius
MAEKIVMKNGQLQVSDRPIIPFIEGDGVGHDIWKNAQAIFDKAVEVAYEGKRHIEWQELLAGKKAYDKTGEWLPKETLEAIRESLVAIKGPLETPVGGGIRSLNVALRQELDLYACVRPVRYFDGVASPLKEPEKTNITIFRENTEDIYAGIEWEAGTADVKRVIEFLQTEMNVNKIRFPESSSIGIKPISIEGSKRLIRSAIDYALKNNLKKVTLVHKGNIQKFTEGGFRKWGYEVAQEDYKEELLAGRLEINDIIADNFLQQILLNPEKFDVVALTNLNGDYASDALAAQVGGIGISPGANINYQTGHAIFEATHGTAPDIADQDKANPCSVLLSGCMLLDYIGWTEAAQLITSAIEKTFKADIFTADLAFGKQAYSTSAFSNQILSIM

SEQ ID NO: 10638 - protein, 45 aa, Enterococcus faecalis
EKGFGFISREDGSDVFVHFSAIQGDGFKTLEEGQAVTFDVEDSDR

SEQ ID NO: 10639 - protein, 191 aa, Methanococcoides burtonii DSM 6242
MRTLMKIVALTTMILTIAVSGCATTDTDEPEPIPEIIEDENNVPEQEIFLISTSAFENNGEIPSRYTCDGDNINPELVPGSLPEDTVSLVLIVDDPDAPIGTFTHWIVWNIAPGSIIEENTVPGIQGLNGAKGTDYLGPCPPSGTHRYFFRFYALDTMLDIGSGSTRTTLEEAMQEHIIAEGELMGTYSSD

SEQ ID NO: 10640 - protein, 341 aa, Streptomyces coelicolor A3(2)
MRIGVLTAGGDCPGLNAVIRSVVHRAVDNYGDEVIGFEDGYAGLLDGRYRALDLNAVSGILARGGTILGSSRLERDRLREACENAGDMIQNFGIDALIPIGGEGTLTAARMLSDAGLPVVGVPKTIDNDISSTDRTFGFDTAVGVATEAMDRLKTTAESHQRVMVVEVMGRHAGWIALESGMAAGAHGICLPERPFDPADLVKMVEERFSRGKKFAVVCVAEGAHPAEGSMDYGKGAIDKFGHERFQGIGTALAFELERRLGKEAKPVILGHVQRGGVPTAYDRVLATRFGWHAVEAAHRGDFGRMTALRGTDVVMVPLAEAVTELKTVPKDRMDEAESVF

SEQ ID NO: 10641 - protein, 46 aa, Klebsiella pneumoniae
SKGFGFISPKDGSKDVFVHFSAIQSDSFKTLNEGQEVSFTIENGAK

SEQ ID NO: 10642 - protein, 289 aa, Triticum aestivum
MAMSDLAAAVISKANGGVDGEEPVEIREVWADNLEAEFALIRDVVDEFPFVAMDTEFPGIVCRPVGAFRSPADYNYATLKANVDMLHLIQLGLTFSGPTGELPALGAGRRRCVWQFNFREFDDERDIFATDSIELLRHSGIDFRRNAERGVDARRFAELLMSSGVVLNDAVYWVTFHAGYDFGYLLKILTCNSLPDTQAGFFKLMKIYFPTVYDIKHLMKFCNSLHGGLNKLAELLDVERVGESHQAGSDSLVTSCAFWKLKDSFFAGSTEKYAGVLYGLNAENGVSAH

SEQ ID NO: 10643 - protein, 126 aa, Triticum aestivum
MSATCAADLGPLLGAAAANATDYLCNRFADTTSAVDSTYLLFSAYLVFAMQLGFAMLCAGSVRAKNTMNIMLTNVLDAAAGALFYYLFGFAFAFGTPSNGFIGKHFFGLKDMPQTGFDYSFFLFQW

SEQ ID NO: 10644 - protein, 45 aa, Lactobacillus casei
DKGYGFITGEDGQDVFVHFSAINGEGYKSLDEGQAVSYDVEQSDR

SEQ ID NO: 10645 - protein, 45 aa, Listeria grayi
EKGFGFISREDGSDVFVHFSAIQGDGFKTLEEGQAVTFDVEESDR

SEQ ID NO: 10646 - protein, 45 aa, Listeria innocua
EKGFGFIERENGDDVFVHFSAIQGDGFKSLDEGQAVTFDVEEGQR

SEQ ID NO: 10647 - protein, 181 aa, Glycine max
MAYSMLSSAAVVTSPAQATMVAPFTGLKSSSAFPVTRKANNDITSIVSNGGRVSCMKVWPPVGKKKFETLSYLPDLTEVELGKEVDYLLRNKWIPCVEFELEHGFVYREHGSTPGYYDGRYWTMWKLPLFGCTDSAQVLKEVQECKTEYPNAFIRIIGFDNNRQVQCISFIAYKPPSFTGA

SEQ ID NO: 10648 - protein, 135 aa, Triticum aestivum
  misc_feature (34)..(34): Xaa can be any naturally occurring amino acid
  misc_feature (64)..(64): Xaa can be any naturally occurring amino acid
  misc_feature (72)..(72): Xaa can be any naturally occurring amino acid
  misc_feature (100)..(100): Xaa can be any naturally occurring amino acid
  misc_feature (113)..(113): Xaa can be any naturally occurring amino acid
  misc_feature (121)..(121): Xaa can be any naturally occurring amino acid
MSDSEDHHFESKADAGASKTYPMQAGAIRKGGFXVIKNRPCKVVEVSTSKTGKHGHAKCHFVAXDIFNGKKXEDIVPSSHNWDVPQCWTVLEYQLIDISXEDGFVSFLTDNGXTLRDDLKXQTDDAILDQLKGRF

SEQ ID NO: 10649 - protein, 293 aa, Schizosaccharomyces pombe
MPFIKAVKSSPYFSRYQTKYRRREGKIDYYARKRLIAQAKNKYNAPKYRLVVRFSNRFVTCQIVSSRVNGDYVLAHAHSSELPRYGIKWGLANWTAAYATGLLVARRALAKVGLADKYEGVTEPEGEFELTEAIEDGPRPFKVFLDVGLKRTSTGSRVFGAMKGASDGGLFIPHSPNRFPGFDIETEELDDETLRKYIYGGHVAEYMEMLIDDDEERYQKQSSGLIADGIESDQLEDIYAEAYAKIREDPSFQKSGKDAAAFKAESLKHTQRKLTAEERKERFNAKVIEAGRA

SEQ ID NO: 10650 - protein, 112 aa, Prunus persica
KVLVIGGGDGGVLREVARYSSIEQIDICEIDKMVVDVSKQFFPAVAVGYEDPRVKLHVGDGVAFLKAVPAGTYDAVIVDSSDPIGPAQELLEKPFFQTVANALRPGGVVTTQ

SEQ ID NO: 10651 - protein, 163 aa, Triticum aestivum
  misc_feature (114)..(114): Xaa can be any naturally occurring amino acid
MEGRMFGLETPLMTALQHLLDVPDSESGGAGNAGGERQGPTRAYVRDARAMAATPADVKELPGAYAFVVDMPGLGSGDIKVQVEDERALVISGERRREEKEDARYLRMERRMGXKLMRKFVLPENADMEKISAVCRDGVLTVTVEKLPPPEPKKPKTIQVQVA

SEQ ID NO: 10652 - protein, 143 aa, Cichorium intybus
MAREKIKIRKIDNITARQVTFSKRRRGLLKKAEELAVLCDADVALVIFSATGKLFEYASSSMQELLGKYKLHSTNNVNKVDEPSLDLQLVESQESRMSQEVLEKDRELSQLRGEDLQGLTLEELQRLESLLEGRLNRVAPDKG

SEQ ID NO: 10653 - protein, 392 aa, Zea mays
  misc_feature (141)..(141): Xaa can be any naturally occurring amino acid
  misc_feature (175)..(175): Xaa can be any naturally occurring amino acid
  misc_feature (192)..(192): Xaa can be any naturally occurring amino acid
MLVCMYFPLPAPHEVARAPRGALRLARPVSSLVAAASARGVPDLACVPPAPGRRPGPASGIAATVRHVFSLGEGSPLTVAARGHGHSLMGQSQAAQGIVVRMESLRGARLQVHDGFVDAPGGELWINVLRETLKHAWHPSXTDYLHLTVGGTLSNAGVSGQAFRHGPQVSNVNQXEIVTGLKRTLKAFNQKXTELLSRLRIINRTGVLNNWRASFKPQDPVEASHFQSDGRVLYCLELTKNFNSDDTDTMEQVNLEFLDRVHTSELKLRAQGLWEVPHPWLNLLIPRSSIRRFAKEVFGKILVGFLSSAPSLSGYGSIAHSMNLNKQIVEFCEEAGIGMKQYLAPYTTQQQWKAHFGARWETFERRKHRYDPLAILAPGQRIFPKASLPLPL

SEQ ID NO: 10654 - protein, 103 aa, Prunus persica
ECAYQEMIALLPLCSIPSPKTVLVVGGGDGGVLREVSRHPSVEHIDICEIDKMVVDVSKKFFPQLAVGFQDPRVHLHIGDATEFLRHAPKGKYDAVIVDSSDP

SEQ ID NO: 10655 - protein, 198 aa, Zea mays
MDLSNISIQWFRIHPKESNKEIISGATRPVYALEPHDVGRYLQAEIDVGGEIAVAKTAGPVDPDAGLVDYVETLVRKPETEFNVVVLQSNGVDQPKESVHVLNVGRLRMRLTKGKSVVAKEFYSSSMQLCGVRGGGEAASQAMFWRPRNDLSLVLAFESTRERNAAIMLARRFAVDCNVCAFTKRYIILAGPGDKTPW

SEQ ID NO: 10656 - protein, 319 aa, Geobacter sulfurreducens PCA
MKKIGILTSGGDCSGMNAAIRAAVRTAIRMNIEVVGFRKGYLGLMKGDAIPLDTKAVSGILHRGGTFLQSARSPEFKTPEGQRTALNNLKALGVEGMVVMGGDGSLTGALALNRLGLPVVGIPASIDNDIPFTDMALGVDTALNNIIYAVDCIKDTASSHARAFVIEVMGRHSGYLASISAIATGAEYALVPEREYDLAEICQQLRARYEEGRDNAIIILAEGAGHGHEIANSIKDAIGFETRVTVLGHYQRGGAPTVFDRLLASRLGKKSVELLVTGTWGVMVGLSCNAILATPLEDVIKGEKRPQDEVLRLAEVLGV

SEQ ID NO: 10657 - protein, 482 aa, Ustilago maydis 521
MTVGVASKLLDAPFSHVINGKSVDTQGFKTLDVIDPATEKAIAQVPIATKETVDQAVDAAHAAFPSWSKTTWDERAKLLEQYGEEYKAMLPELVKLLTAEQGKSIQFAQHECETILPWFTELAKVRLDEKVVHENDTHKAIERYVPLGVCAGIVPWNFPVLLMLWKVTQAIVTGNCIIIKPSPFTPLCDIRIIEAAQKVFPPGVVQIVVGDDNLGPWITEHPRIQKISFTGSTATGKLVAKSCSATLKRFTLELGGNDPLVVLPQQKDLAATAQNVLLAAFFNSGQVCIAAKRIYIHEDIYDEFKATLAQVVQHFKVGPGNEEGVMFGPINNKMQYNKVGEFFEEAKKNNFNLVAGGQVEEKPGFFYPLTIVDNPPENSRLVQEEPFGPIVPLLKWKDEADLVKRINDSQWGLGASVWSSDIQAAERIGRQIESGTIWINCLVHHHPAVPFGGFKSSGIGAEHGKNGLGAYCQVQALWIPKA

SEQ ID NO: 10658 - protein, 357 aa, Neurospora crassa
MAARTLKIGLIPGDGIGKEVIPAGRRILEALPASLGLKFEFIDLKAGWETFEQTGNALPEETVSILKSECDGALFGAVSSPTKAVKGYSSPIVALRKKLDLYANVRPVKSVRGPGVKPIDMVIVRENTEDLYVKEEKTYDTPEGKVAEAIKRISQRASSRIATIAGEIALRRQKIREGGSPSIHKGPLVTVTHKSNVLSQTDGLFRSTAREALAAGRFTSVAVEEQIVDSMVYKLFRQPEAYDVIVAPNLYGDILSDGAAALVGSLGLVPSANVGEGFAIGEPCHGSAPDIQGQNIANPIATLRSAALMLEFLNEEEAAAKIYAAVDANLEEGKLLSPDLGGKAKTEEVVQDILRRL

SEQ ID NO: 10659 - protein, 485 aa, Magnetospirillum magnetotacticum MS-1
MTDLDASLLKTHAYIDGHWAEADDGRRFDVLDPATGHLLASVPDMGGAETRRAIEAAEMAWGPWRRRTAKERAAILMAWFEQIIAHKDALARLLSAEQGKPLPEAQGEIVYGAAFIQWFAEEGKRAYGDLIPTTASDRRLLVMKQPIGVVAAVTPWNFPMAMITRKCAPALAAGCPVVVKPAEDTPLSALVLAELAERAGLPRGVFNIVTTRQPGAVGGEMTANPLVRKLSFTGSTRVGKMLMAQCAETVKKVSLELGGNAPFIVFDDCDLDAAVAGALASKYRNSGQTCICTNRFLVQAGVYEEFGRKLAEKAAAMVVGHALKGPVQQGPLINAAAVAKVASHVADAVSKGARVLTGGRPHELGGGFWQPTVLADVTAQMLCFQEETFGPVAPLVRFETEEEAVELANASQFGLAGYFYSRDLARVFRVAEAMECGMVGVNESLISNEVAPFGGIKESGLGREGSKYGLDDFMETKYVCIGGLS

SEQ ID NO: 10660 - protein, 101 aa, Escherichia coli
MRGSHHHHGSRLQSGKMTGIVKWFNADKGFGFITPDDGSKDVFVHFSAGSSGAAVRGNPQQGDRVEGKIKSITDFGIFIGLDGGIDGLVHLSDISWAQAEA

SEQ ID NO: 10661 - protein, 111 aa, Bartonella sp. pb18975nm
ANEACLKMLQEIGSVKRIPEFIARAKDKNDPFRLMGFGHRVYKNYDPRAKIMQKTCHEVLKELNIQDDPLLDIAIELEKIALNDEYFVEKKLYPNVDFYSWHYEMFTVLFA

SEQ ID NO: 10662 - protein, 382 aa, Saccharomyces cerevisiae
MRALAYFKKGDIHFTNDIPRPEIQTDDEVIIDVSWCGICGSDLHEYLDGPIFMPKDGECHKLSNAALPLAMGHEMSGIVSKVGPKVTKVKVGDHVVVDAASSCADLHCWPHSKFYNSKPCDACQRGSENLCTHAGFVGLGVISGGFAEQVVVSQHHIIPVPKEIPLDVAALVEPLSVTWHAVKISGFKKGSSALVLGAGPIGLCTILVLKGMGASKIVVSEIAERRIEMAKKLGVEVFNPSKHGHKSIEILRGLTKSHDGFDYSYDCSGIQVTFETSLKALTFKGTATNIAVWGPKPVPFQPMDVTLQEKVMTGSIGYVVEAFEEVVRAIHNGDIAMEDCKQLITGKQRIEDGWEKGFQELMDHKESNVKILLTPNNHGEMK

SEQ ID NO: 10663 - protein, 83 aa, Triticum aestivum
MAGSLTVSGVLVWRRDVMTHSFGEGYSTRSDEEGFGGVYGQNDPVLNPGTEVHPDHPDYDKSQGSEVKEKEKARHLKDDKHAT

SEQ ID NO: 10664 - protein, 257 aa, Glycine max
MFSKLQPQHQQQHQPFQFSRECQTSEDDDSRSSGGPNTAVAQKSVLGGGGCSDGATIEVVRRPRGRPPGSKNRPKPPLIITREPEPAMSPFILEIPGGSDVVEALARFSRRKNTGLCVLTGSGTVANVTLRQPSFSPAGASVATVTFHGRFDILSMSATFLHHGSPAAIPNALAVSLSGPQGQIVGGLVAGRLLAAGTVFVIAASFNNPSYHRLSSEEDAQNTSDGGGDRQSPAESSMYSCHRPSDVIWAPTPRPPF

SEQ ID NO: 10665 - protein, 291 aa, Triticum aestivum
  misc_feature (162)..(162): Xaa can be any naturally occurring amino acid
MAGLSMEHPWAFAFGLLGNIISFSSLLAPIPTFYRIFKSKSTEGFQSVPYVVALFSAMLWIFYALVKTGEGLLITINAAGCVIETIYIVMYLVYAPRKAKIFTAKIVLLLNIAGFGLIFLLTVFAFQGETRVISLGWICVGFSVCVFVAPLSIIGRVIKTKXSVEYMPFTLSLTLTLSAIVWFLYGLLIKDKYVALPNILGFTFGVIQMVLYVFYMNKTPVASEVKEGKEAWKVPAEDHVVVINVGKADKSSCAEVRPVTEMAGAVDVPRRCAAEAAAAPGMDFARSVDVV

SEQ ID NO: 10666 - protein, 380 aa, Acremonium chrysogenum
MTTTYKILVLPGDHIGPEIMAEAIKVLTTIETHRPNLHFNLTTDLVGGTSIDTHGVPITQSVLDAAKASDAVLFGSIGGPEWAGVHPTPESGLLQLRQHLDAFANLRPCEFLVPSLVGASPIREHVVKGTRFIVVRENCGGAYFGEKKEEEDVASDLWVYTRPEIERLARVSAAVARIMGRSEDDNQAATVWSADKANVLASGRLWRRITSDIFAKEFPDITLQHQLADSMAMLMVRDPRRFNGVIHTDNTFGDILSDISGAITGTLGLMPSASLCGVPGEGHRSNGIYEPVHGSAPDISGKGLANPVAQILSVAMMLRYSMGLEKEATAVERAVVKVLDAKSEGGLEIRTGDLGGRATCSQVGDAVCEVLGPLLQGKKA

SEQ ID NO: 10667 - protein, 222 aa, Panicum miliaceum
IENKISRQGTFAKRRNGLLKKAYELSLLCDAEVALIIFSGRGRLFEFSSSSCMYKTLERYRSSNYSSQEVKTPLDGEINYQDYLKLKTRVEFLQTTQRNILGEDLGPLSMKELEQLENQVEISLKHIRTRKNQMLLDHLFDLKSKEQELQDLNKDLRKKLQETNAENVLHVSWEEGGHSGASGNAIEPYQGFLQHPENDPSLQIGYHQQAYMDQLNNEDMAD

SEQ ID NO: 10668 - protein, 184 aa, Cucumis sativus
VSRSLSTALLADGVGEAAQIYCELVRLGANMRVIDIGGGLGIDYDGSKSSDSELSVAYGLEEYAAAVVDAVRCVCDCRSVKHPIICSESGRAIVSRHSVLIFEAVSASSYEVPSMSSLELQYLVDGLTDEARVDYQNLSAAAYMGEYKTCLVYADQLKQRCVEKFKDGCLGMEQLAAVEGIARQ

SEQ ID NO: 10669 - protein, 246 aa, Glycine max
MGKSYPTVSADYQKAVEKAKKKLRGFIAEKRCAPLMLRLAWHSAGTYDVSSKTGGPFGTIKHPSELAHGANNILDIAVRLLEPLKAEFPILSYADFYQLAGVVAVEVTGGPEVPFHPGREDKPEPPPEGRLPDATKGSDHLRDVFGKAMGLSDRDIVALSGGHTIGAAHKERSGFEGPWTSNPLIFDNSYFKELLSGEKEGLLQLPSDKALLSDPVFRPLVEKYASDEDAFFADYAEAHQKLSELG

SEQ ID NO: 10670 - protein, 222 aa, Pennisetum glaucum
IENKISRQVTFAKRRNGLLKKAYELSLLCDAEVALIIFSGRGRLFEFSSSSCMYKTLERYRSSNYGSQEVKTPSDGEINYQDYLELKTRVEFLQTTQRNILGEDLGPLSMKELEQVENQIEISLKHIKDKKNQMLLNQLFDLKSKEQELQDLNKDLRKKLQETNAESVLHLSWEEGGHSGTGGNAIEPYQGFLQHPENDPSLQIGYHQQAYIDQLNNEDMAD

SEQ ID NO: 10671 - protein, 222 aa, Setaria italica
IENKISRQVTFAERRNGLLKKAYELSLLCDAEVALIIFSGRGRLFEFSSSSCMYKTLERYRSSNYGSQEIKTPLDGEINYQDYLKLKTRVEFLQTTQRNILGEDLGPLSMKELEQLENQIEIFLKHIRTRKNQMLLDQLFDLKSKEQELQDLNKDLRKKLQETNAESVLHVSWEEGGHSGTSGNAIEPYQGFLQHPDNDPSLQIGYHQQAYMDQLNNEDMGD

SEQ ID NO: 10672 - protein, 337 aa, Vibrio cholerae O1 biovar eltor str. N16961
MFNQYHKLPLFLYTVLCVRLSSRALNTFEELNMTNYLERGIKELVEEFISSGKPCPSKQTISERRAGYLSSTVLAGSSPEMADEFVDELDGIQVKVYKPSDKIDLPITIYFHGGCFISGGFETHEAQLRQLAHLSETIVVCIKYRLAPEHAYPSAHDDVFQAALGIKEHGHKYGGDTEHVFFVGDSAGAQLALATALRLKNKKLWLPEKQILIYPMVDPLGVSDSYQKNGTDFIITAQMLLSGFQLYAGESERLASEKELNLLARKDLQGLPPTLIITAEYDPLRDEGEQLYRLLLSQGVDAYCERYLGVIHGFYQLSGVSESARRCIRNIANAIKN

SEQ ID NO: 10673 - protein, 483 aa, Tortula ruralis
MTGEVKEYRLLLASKPVEADREFLDVTNKYTGEVGAKVQLATHDDVDKAIDAAVAAAPAMAALGAFERKAILEKTVAELKKRAEEIAQILTMESGKPIKDARGEVARTIDTFQVAAEESVRIYGEHMPLDISARNKGPQGIVKKFPIGPVSMVSPWNFPLNLVAHKVAPALAVGCPFVLKPASRTPLSALILGDILVPDRGAAKGAFSVLPVSRADADMFTVDERFKLLTFTGSGPVGWDMKARAGKKKVVMELGGNAPCIVDDYVPDLDYTIQRLINGGFYQGGQSCIHMQRLYVHERLYDEVKAEFLAQVKKLKVGNPFEDDTFIGPMISEKDATRVEDWVKEAVEKGGKLLCGGSRKGAVMQPTVLEDVPMDAMARKEEIFGPVVLFYKYSDFKEAVKECNNTHYGLQSGIFTKDLNKAFYAFEHMEVGGVILNDSPALRVDSQPYGGLKDSGIQREGVKYAMEDYLETKVLVMRNVGVL

SEQ ID NO: 10674 - protein, 175 aa, Triticum aestivum
  misc_feature (63)..(63): Xaa can be any naturally occurring amino acid
MAPTVMATSVTSVAPFQGLKSTAGLPVSRRSSSAGLGSVSNGGRIRCMQVWPIEGIKKFETLXYLPPLSTEALLKQVEYLIRSKWVPCLEFSKVGFVFREHNSSPGYYDGRYWTMWKLPMCGCTDTTQVLKEVEDVKKEYPDAYVRVIGFDNLRQVQCVSFIAFRPPGCEESDKA

SEQ ID NO: 10675 - protein, 282 aa, Bacillus subtilis subsp. subtilis str. 168
MTIQWFPGHMAKARREVTEKLKLIDIVYELVDARIPMSSRNPMIEDILKNKPRIMLLNKADKADAAVTQQWKEHFENQGIRSLSINSVNGQGLNQIVPASKEILQEKFDRMRAKGVKPRAIRALIIGIPNVGKSTLINRLAKKNIAKTGDRPGITTSQQWVKVGKELELLDTPGILWPKFEDELVGLRLAVTGAIKDSIINLQDVAVFGLRFLEEHYPERLKERYGLDEIPEDIAELFDAIGEKRGCLMSGGLINYDKTTEVIIRDIRTEKFGRLSFEQPTM

SEQ ID NO: 10676 - protein, 46 aa, Photobacterium mandapamensis
EKGFGFLTQNNGGADVFVHFRAIASEGFKTLTEGQKVSFDVEQGQK

SEQ ID NO: 10677 - protein, 480 aa, Streptococcus pneumoniae TIGR4
MPIQNKTMLITYSDSLGNNLKDLYDNLEEHFGDAIGGVHLLPFFPSTVDRGFAPVDYDEVDSAFGDWEDVKRLGEKYYLMFDFMINHISRQSKYYKDYQEKHEASEFKALFLNWDKFWPENRPTQSDVDLIYKRKDRAPKQEIVFEDGSVEHLWNTFGEEQIDLDVTKEVTMEFIRKTIQHLASNGCDLIRLDAFAYAVKKLDTNDFFVEPDIWDLLDKVRDIAAEYGTELLPEIHEHYSIQFKIADHDYYVYDFALPMVTLYTLYSSRTERLAKWLKMSPMKQFTTLDTHDGIGVVDVKDILTDEEIDYASNELYKVGANVKRKYSSAEYNNLDIYQINSTYYSALGDDDVKYFLARLIQAFAPGIPQIYYVGLLAGKNDLKLLEETKEGRNINRHYYSNEEIAKEVQRPVVKALLNLFSFRNRSEAFDLEGTTEIETPTAHSIVIKRQNKDKSVTAVVEIDLQNQTYRVIENGVEVSF

SEQ ID NO: 10678 - protein, 45 aa, Pediococcus pentosaceus
EKGFGFIEVEGENDVFVHVSAINQDGYKSLEEGQSVEFEVVEGDR

SEQ ID NO: 10679 - protein, 466 aa, Synechococcus sp. WH 8102
MPIDSVTAALEALDHQDAGVRYHGAWWLGKNRSAEGVPRLVECLLDERDKTCTGGYPLRRQAARSLGMIKDSRCLPELLKTLETDDVQLHEATLRALIQIKSDQCSSSLINYLDRDIPNKPIEALIEALTEQRMWDVSEKIQPFLNDKSERIAGSAAAFFYSYTGEMTYLNKVISLLDHQNRFIRQSAAFDLARIGTIKATDPILTAKIPNNVKMFAIKAILNKSLSRSNQADSIPDTDLASIHSSLFKALDSLARDNFSGNLLIEQDNQIPETYPGDGSTESDLLSNAFDNLRSPSLTSRKSGIKQLVRGANRFKIDLLDLYFSESDQDITMGLIKAMAELKNPHYANALIDAIGVEIGNHCQGNIRRVAACALGDINWNAKISSQSLHAVFNKLKWTLHSPEDWGLRYSACLALEGIGNADSIKLLNEAKAKETDPVLSARLDKAILKSKNKTSIHHIENKKVL

SEQ ID NO: 10680 - protein, 168 aa, Glycine max
MIFSPSVTTVNRAGAGVVALFTGLMSMAGFPTENTNSDITYIASNCGRVQCVRVWPPFGKKKFETLFYLPDLDDAQLAREVIYLLRKGWIPCLEFELEHGFVYREHNRSPVLYYGLYWTMWKLSMCGCSDASHVLRDLLDAKSAYPCGFMRIIICHNVTQVHRISFIV

SEQ ID NO: 10681 - protein, 365 aa, Glycine max
  misc_feature (36)..(36): Xaa can be any naturally occurring amino acid
  misc_feature (122)..(122): Xaa can be any naturally occurring amino acid
MATTRSAPLLKHLLTRLNPSRSVTYMPRPGDGTPRXVTLIPGDGIGPLVTGAVEQVMEAMHAPLYFEKYEVHGDMKAVPAEVLESIRKNKVCLKGGLATPMGGGVNSLNVQLRKELDLYASXLVNCFNLPGLPTRHDNVDIVVIRENTEGEYSGLEHEVVPGVVESLKVITKFCSERIAKYAFEYAYLNNRKKVTAVHKANIMKLADGLFLESCREVATRYPGIKYNEIIVDNCCMQLVSKPEQFDVMVTPNLYGNLVANTAAGIAGGTGVMPGGNVGADHAVFEQGASAGNVGNDKVVEQQKANPVALLLSSAMMLRHLQFPAFADRLETAVKKVILEGKYRTKDLGGTSTTQEVVDAVIDALD

SEQ ID NO: 10682 - protein, 46 aa, Photobacterium phosphoreum
EKGFGFITQDNGGADVFVHFRAIASEGFKTLAEGQKVSFEVEQGQK

SEQ ID NO: 10683 - protein, 47 aa, Proteus vulgaris
DKGFGFITPKDGSKDDVFVHFSAIQSDSFKSLKEGQEVSFSIENGAK

SEQ ID NO: 10684 - protein, 169 aa, Streptomyces avermitilis MA-4680
MTTDNAATSVLDTEIDALQGGSADLSQYAGKAVLIVNVASKCGLTPQYAGLERLQERYAAQGFTVLGVPCNQFLGQEPGTSEEIAEFCSATYGVTFPLTEKVEVNGDARHALYESLVGFADGEGHTGDIRWNFEKFLIGRDGKVVARFSPQTEPESAEVVTAVERQLAG

SEQ ID NO: 10685 - protein, 361 aa, Triticum aestivum
LGCREAEEMGSTADEEACMFALQLGSSSILPMTLKNAIELGLLDTLVAADGKLLSPAEVAAKLPSTANPAAPDMVDRMLRLLASYKVVSCTVEEDKDGRLSRRYGAAPVCKFLTPNEEGVSMAPLALMNQDKVLMESWYYLKDAVLDGGIPFNKAYGMSAFEYHGTDPRFNRVFNEGMKNHSIIITKKLLELYKGFSGLGTLVDVGGGIGATVGAITAHYPTIKGINFDLHHVISEAPPFLGVTHIGGDMFQKIPSGDTILMKWILHDWSNEHCATLLKNCYDALPAHGKVMLVESILPVNPEATPEAQGGFHLDMIMLAHNPGGRERYEREFEALAKGAGFGAIKTTYIYANTWVIEFTK

SEQ ID NO: 10686 - protein, 90 aa, Brassica napus
  misc_feature (67)..(67): Xaa can be any naturally occurring amino acid
MCVVDQEVENRLALLVHITSLCFPLDTWRERRKMADEGMANCIDIILAIILPPLGVILKFACGIEFXICLLLTFFGYLPGIIYAVWVITK

SEQ ID NO: 10687 - protein, 238 aa, Glycine max
FIKCFVGSEEGTPDSVNPSVVDDDEEEGLPSPPLDEGAFFVTQAGSMELSQFFDGMDDDGNPRPTGPFSKNHENGRKPAFDSHVLEMRKLQPSHDTVVINRDVKSQQQAKENKAAVMPVRPNKPVTADSGPGRPPKSNVQRKSNMEPKMQQKMENNSITRRPPTAQLDKSKRSDDDAVQVKLEATKRKLQESYQQAEKAKRQRTIQVMEINDLPKQGLHRNTHFKPGYHSRHWANGRR

SEQ ID NO: 10688 - protein, 207 aa, Zea mays
LLPPYLPTTRLLLSSEPARSPAAAIPPTPPPSGRTGNLAMAAASSATSVHDFTVKDSSGKDVDLSVYKGKVLLIVNVASQCGLTNSNYTELSQLYPKYKDQGFEILAFPCNQFGGQEPGTNDEIVQFACTRFKAEYPIFDKVDVNGSNVSPLYKFLKSSKGGLFGDSIKWNFSKFLVDKEGHVVDRYAPTTSPLSIEKDIKKLLGSS

SEQ ID NO: 10689 - protein, 112 aa, Bartonella sp. sa18991nm
ANEACLKMLQEIGSIKRIPEFIARAKDKNDPFRLMGFGHRVYKNYDPRAKIMQKTCHEVLKELNIQNDPLLDIAIELEKIALNDEYFVEKKLYPNVDFYSGITLKALGFPTE

SEQ ID NO: 10690 - protein, 497 aa, Saccharomyces cerevisiae
MTLSKYSKPTLNDPNLFRESGYIDGKWVKGTDEVFEVVDPASGEIIARVPEQPVSVVEEAIDVAYETFKTYKNTTPRERAKWLRNMYNLMLENLDDLATIITLENGKALGEAKGEIKYAASYFEWYAEEAPRLYGATIQPLNPHNRVFTIRQPVGVCGIICPWNFPSAMITRKAAAALAVGCTVVIKPDSQTPLSALAMAYLAEKAGFPKGSFNVILSHANTPKLGKTLCESPKVKKVTFTGSTNVGKILMKQSSSTLKKLSFELGGNAPFIVFEDADLDQALEQAMACKFRGLGQTCVCANRLYVHSSIIDKFAKLLAERVKKFVIGHGLDPKTTHGCVINSSAIEKVERHKQDAIDKGAKVVLEGGRLTELGPNFYAPVILSHVPSTAIVSKEETFGPLCPIFSFDTMEEVVGYANDTEFGLAAYVFSKNVNTLYTVSEALETGMVSCNTGVFSDCSIPFGGVKESGFGREGSLYGIEDYTVLKTITIGNLPNSI

SEQ ID NO: 10691 - protein, 400 aa, Neurospora crassa
MLSRNSMVCLLILLLLLLSWLLRLARAVAQPTPRLARGFASVQDTPAQTLQSDIFKPTKYGGKYTVTLIPGDGIGAEVAESVKTVFKADNVPITWEQIEVSGVQDNASRTEEAFQQAVASLRRNKLGLKGILHTPISRSGHQSFNVAMRQELDIYASISLVKNLPGLQTRHKDVDLCIIRENTEGEYSGLEHQSVDGVVESLKIITRAKSERITKFAFQFALANQRKKVTCIHKANIMKLADGLFRGTFNRLAKDFPQLECNDMIVDNASMQCVSKPQQFDVMVMPNLYGGILSNIAAALVGGPGVVPGCNMGRDVAVFEPGCRHVGLDIQGKDQANPTALLLSGTMLLRHLGLDDHANRISNAVYDVIAQGKVRTRDMGGEASTHEFTRAILDSMEKSL

SEQ ID NO: 10692 - protein, 162 aa, Daucus carota
MDLRFMGIDHPLFDTLYHILDDDEHDTTDTGNTKRNKSRHERRYVRDAKAMATTAADVKEYPNAYLFVVDMPGLKSGDIKVQVEDGNVLVVNGERKREEEEGVKYLSMGRKVGRFLKKFVVPENANLENIKAVCQDGVLSVTVEKLPPPEPKKPKTIEVQIA

SEQ ID NO: 10693 - protein, 186 aa, Bdellovibrio bacteriovorus HD100
MIRCPLLSQNEISSHTHAAPLRRFPMKKHLYDFTVKAANGQPVSLDQYRDKVVLVVNVASKCGYTPQYKGLEELYQQNKDNGLVILGFPCNQFGAQEPGSNEEIQQFCELNYGVSFPVMGKVDVNGGNADPLYQWLKEEAPGLLGTEMIKWNFTKFLVGKDGAVLKRFAPKDEPKDIADDIKKALA

SEQ ID NO: 10694 - protein, 223 aa, Arabidopsis lyrata
MRIRRREEKENQEYKKGLWTVEEDNILMDYVLNHGTGQWNRIVRKTGLKRCGKSCRLRWMNYLSPNVNKGNFTEQEEDLIIRLHKLLGNRWSLIAKRVPGRTDNQVKNYWNTHLSKKLVGDYSSAVKTTGEDDDSLPSLFITAATTSCHHQQENVYENIAKRFDGVVSASYEDKPKQELAQNDVLMATTNDPSHYYGNNALWVHDDDFELSSLFTRNDEFCFW

SEQ ID NO: 10695 - protein, 271 aa, Triticum aestivum
MPSRPAPLVHRLRLLRSAVVSPSSALLPCSRPRLAIPFAQPPLRAAAFAAASSPLLRPVGARFSLFSSMAAAASSASSVHDFTVKVCLPHVAPAPSVISIRISHPSPCQFSVSAIALAHDASGKDVDLSTYKGKVLLIVNVASQCGLTNSNYTELAQLYEKYKDQGFEILAFPCNQFGGQEPGTNEEIVQFACTRFKAEYPIFDKVDVNGDNVAPVYKFLKSSKGSLFGDNIKWNFSKFLVDKEGRVVDRYAPTTSPLSIEKDIKKLLASS

SEQ ID NO: 10696 - protein, 364 aa, Arabidopsis thaliana
MGKGGMSQGEGSKVEEENMAAWLVGINTLKIQPFLLPSVGPHDVRVRMKAVGICGSDVHYLKTMRCADFVVKEPMVIGHECAGIIEEVGEEVKHLVVGDRVALEPGISCWRCNLCREGRYNLCPEMKFFATPPVHGSLANQVVHPADLCFKLPENVSLEEGAMCEPLSVGVHACRRAEVGPETNVLVMGAGPIGLVTMLAAQAFSVPRIVIVDVDENRLAVAKQLGADEIVQVTTNLEDVGSEVEQIQKAMGSNIDVTFDCAGFNKTMSTALAATRCGGKVCLVGMGHGIMTVPLTPAAAREVDVVGVFRYKNTWPLCLEFLTSGKIDVKPLITHRFGFSQKEVEDAFETSARGSNAIKVMFNL

SEQ ID NO: 10697 - protein, 187 aa, Candida albicans SC5314
MSDQIPVENQQVPSENSEEVKNKLEEMEQETAKLRELHSQLSSESTNGVTHPTDEEKRDTDARSIYIGNVDYGSTPLELQQHFSSAGVVNRVTILTNKFTGQPKGFAYLEFADTDAVNKAVATLDGSTFRERQLKVSAKRTNIPGISVKRGFPGRGRGNFRGGRGRGGRGGRGGFRGARGGPRFNPY

SEQ ID NO: 10698 - protein, 486 aa, Rhodobacter sphaeroides 2.4.1
MIEKRDFYINGGWTAPAEARDCEVIDPSTEEACAVISLGDQADTDAAVAAAKAAFEGWAATPPAERLRLVKGILAQYEARKEEMAQAISLEMGAPIDLARNSQAPCLPWHLTNFLKAFEEIEWVRPLGPHAPNDRIALEPIGVVGLITPWNWPMNQVTLKVIPALLAGCTCVLKPSEEAPLSSLLFAEFVHDAGLPAGVFNLVNGDGAGVGTQLSSHPDVEMISFTGSTRAGRAISKAAAESLKRVTLELGGKGANLIFADADERAVERGVKHCFNNSGQSCNAPTRMLVERPLYDRAVEIAAEVAAKTRVASAHEEGPHIGPVVNKRQFEQIQSYIQKGIDEGARLVAGGLGRPDGLNRGFFVRPTVFADVTPGMTIEREEIFGPVLSILPFETEEEAVRIANDTPYGLTNYVQSEDGARRNRLARRLRSGMVEMNGKSRGAGAPFGGVKASGRAREGGVWGIEEFLEVKAISGWDPEAEALAAE

SEQ ID NO: 10699 - protein, 112 aa, Bartonella sp. pm19058nm
ANEACLKMLQEIGSVKRIPEFIARAKDKNDPFRLMGFGHRVYKNYDPRAKIMQKTCHEVLKELNIQDNPLLDIAIELEKIALNDEYFVEKKLYPNVDFYSGITLKALGFPTE

SEQ ID NO: 10700 - protein, 81 aa, Zea mays
CLYVALQMSVQDANMSSDTDMSKVFEDRTFVSSILNSLPGVDPNDPSIKDLLASLHSQGEEEKKEDKLDKTEDEKNCFKLE

SEQ ID NO: 10701 - protein, 301 aa, Arabidopsis thaliana
MTEEFDTTGVCTGTWWSSSNGMFSGCSLPRSAEIVVDFGEIEWQNIDTLDAKTYNENYLSTSTFLGNANLDTTSQIYVSSPSNIHEEERYNQINSFLEGLFDSSEQLLVPNCPKPELFESFHFFDDVFPNESRMISVFDHQKPKEDMQACKSLTTCKRASEKSGELEDIESSQPLKRPRLETPSHFPSFKVRKEKLGDRITALQQLVSPFGKTDTASVLHDAIDYIKFLQEQITEKVSTSPHLNSIGSGEQKQWSDKSSNNTHNQNCSPRQDLRSRGLCLMPISSTFSTPPQHLDTSSLWN

SEQ ID NO: 10702 - protein, 253 aa, Oryza sativa (japonica cultivar-group)
MERTTTRRTSSKGAAAAPAPKVVAVLAGLLERAAARGDADADARGGSAAAAAATAFRGRTRPEISVRRYAERIYRYAGCSPACFVVARVYLDRLAGRSPEEESSPSPSPPATAAAAVCVDSYSVHRLLITSVMVAAKFMDDIHYNNAYFARVGGVEVAEMNGLELELLFALRFRLNVTPATFATYCAALEGEMAADDGPLPSPSPSPEEEGNDRRQPPPRRKDGITNKVAAAVDRSALLTAAHHRVVVVEITQ

SEQ ID NO: 10703 - protein, 357 aa, Colletotrichum lagenarium
MAEFIRAQIFGTTFEITSRYSDLQPVGMGAFGLVCSARDQLTNQNVAVKKIMKPFSTPVLAKRTYRELKLLKHLRHENVISLSDIFISPLEDIYFVTELLGTDLHRLLTSRPLEKQFIQYFLYQIMRGLKYVHSAGVVHRDLKPSNILVNENCDLKICDFGLARIQDPQMTGYVSTRYYRAPEIMLTWQKYDVEVDIWSAGCIFAEMLEGKPLFPGKDHVNQFSIITELLGTPPDDVINTIASENTLRFVKSLPKRERQPLKNKFKNADPSAIDLLERMLVFDPKKRITATEALSHDYLAPYHDPTDEPVAEEKFDWSFNDADLPVDTWKIMMYSEILDYHNVDASAQQIEEQFNGQ

SEQ ID NO: 10704 - protein, 272 aa, Lactococcus lactis subsp. cremoris
MKLNNQIEIPELGLGVFQIPNEETAEVVKNGIINGYRLIDTAKIYENEEGTGQGIKEGLASTGLTREDLFVTSKLWGDNHSYKETIQSFEESLKKLDLDYLDLYLIHWPGTNYAYKEAWKAMEDLYKAGKVKAIGVSNFQKHHLEELLSYAEINPVLNQIELHPKLSQKELREFLKLHDIKVQAWSPLMQGQLLDNEMLKKIADKHGKSVAQIILRWDIQQEILVNVKSIKSERMIANRQIFDFALDQEDMEALNSLNEALRVGPNPDTFNF

SEQ ID NO: 10705 - protein, 131 aa, Triticum aestivum
MSYYDRRGESSVLEAFTLSPLPYPVILILMMVTLLLGASWFFSYEEFMEEASEQFSWFLLGVPIALVLLIRWISSVDTFEGYFGFYPTESRWRGYPAAPSEGSSPWGVAMVVLLLLVLASFHSTFQDMWKA

SEQ ID NO: 10706 - protein, 278 aa, Zea mays
MASSSRSTVFSLLLLVALLLSCSGMSSAARLLEEAPPKEEHPHPAVPELPEPELPPHPTDVVPPELPKPELPPHPAVVPELPKPEVPHQVPEQPKPELPPHPTAVPELPKPEVPHPVPELPKPEVPPHPTAVPELPKPEVPHPVPELPKPELTPHPAAVPELPKPEVPHPVPELPKPELPPHPTAVPELPKPEVPHPVPELPKPELPPHPAVPELPKPEVPHPVAPELPKPELPPHPTVPELPHPEVPEVPNHELPPLPKAELPPKPEGHYPEPEAKP

SEQ ID NO: 10707 - protein, 512 aa, Zea mays
  misc_feature (89)..(89): Xaa can be any naturally occurring amino acid
  misc_feature (153)..(153): Xaa can be any naturally occurring amino acid
  misc_feature (207)..(207): Xaa can be any naturally occurring amino acid
  misc_feature (225)..(225): Xaa can be any naturally occurring amino acid
  misc_feature (255)..(255): Xaa can be any naturally occurring amino acid
  misc_feature (320)..(320): Xaa can be any naturally occurring amino acid
  misc_feature (348)..(348): Xaa can be any naturally occurring amino acid
  misc_feature (431)..(431): Xaa can be any naturally occurring amino acid
  misc_feature (447)..(447): Xaa can be any naturally occurring amino acid
MSSSPSFGLLALAAVLLALNLAQHGSLAATVGPRVIVVGAGMSGISAAKRLSEAGITDLLILEATDHIGGRMHKTNFAGINVELGANWXVEGVNGGKMNPIWPIVNSTLKLRNFRSDFDYLAQNVYKEDGGVYDEDYVQKRIELADSVEEMGXEKLSATLHASGRDDMSILAMQRLNEHQPNGPATPGGTWVVDYYKFDYEFAEPPXRVTSLQNTVPLATFSDFXGDDVYFVARPAGATRAVVYYLAGQYLKTRXDSLGKIVDPRLQLNKVVREIKYSPGGVTVKTEDNSVYSADYVMVSASLGVLQSDLIQFKPKLPVXTWKVRAIYQFDMAVYTKIFLKFPRKFWXPEGKGREFFLYASSRRGYYGVWQEFEKQYPDANVLLVTVTDEESRRIEQQSDEQTKAEIMQVLRKMFPGKDVPDATDILVPRXWWSDRFYKGTFSNWPXVGVNRYEYDQLRAPVGRVYFTGEHTSEHYNGYVHGAYLSGIDSAEILINCAQKKMCKYHVQGKYD

SEQ ID NO: 10708 - protein, 45 aa, Streptococcus dysgalactiae
EKGFGFISTENGQDVFAHFSAIQTNGFKTLEEGQKVEFDVEEGQR

SEQ ID NO: 10709 - protein, 503 aa, Ralstonia eutropha JMP134
MRDRTLVISVLIVASCGLGYELIAGALSSYLLGDSILQFSSIIGCYLFAMGVGSWLSRYVKDEDVLARFIDIEILVGLLGGISAALLFVVFAWLSAPFRTALYALVFLTGVLVGMEIPLVMRILNARRAAFSDLVSRVLTFDYLGALAVSLVFPLVLAPRLGLSRTGFLFGMLNAAVALYTTRLFRDELPQVPLRTMRALVVIALLGAGFAGSDRLTHWAERGLFGDEIIHSESTPYQRLVITRWKDDLRLYINGNLQFSSRDEHRYHEALVHPVMQALPWARRVLVIGGGDGLALREILRHRNIEHVTLVDLDPAMTTLFSQSAPLRALNRDSLRDARVTVFNADAAQWMEQNAEVFDAIIVDLPDPSNFGLGKLYSVPMYRLLSRHLAEKGYAVVQSTSPYYAPRSFWGIDATLHEAGLHTWPYHAYVPSFGEWGFILAGKRSDYTPPTRYDMPMKFLDADSTALMFRFPPDMAPRAGHANRLNEQSLVHDFEQDWGNVIR

SEQ ID NO: 10710 - protein, 177 aa, Arabidopsis thaliana
MSSNKIVLTSSDGESFQVEEVVARKLQIVKHLLEDDCVINEIPLQNVTGNILSIVLEYCKKHVDDVVDDDASEEPKKKKPDDEAKQNLDAWDAEFMKNIDMETIFKLILAANYLNVEGLLGLTCQTVADYIKDKTPEEVRELFNIENDFTHEEEEEAIRKENAWAFEADTKHEDPKP

SEQ ID NO: 10711 - protein, 431 aa, Zea mays
  misc_feature (141)..(141): Xaa can be any naturally occurring amino acid
  misc_feature (203)..(203): Xaa can be any naturally occurring amino acid
  misc_feature (247)..(247): Xaa can be any naturally occurring amino acid
  misc_feature (256)..(256): Xaa can be any naturally occurring amino acid
MAEKENILMQRYEMGKLLGKGSFAKVYHARNVKTSESVAIKVIDKDKIKKCGLMDQIIQEISVMKLVKHPNIVQLYEVMATKTKIYFVIEYVNRDEALNSLNRYMVECNSAAKKLTILNAFDIISLSNGFDLSGIFENSNXSIILGFGLSALPNCTKKDGLLKRICGTPAYVAPEVISQKGYAGAKADIWACGVILYVLLAGXLPFQDKNMMDMYKKICKAELKWPSWFSSDVRKLIVWALPSCTTXRIIEEISSXPWFRIGLDARLFDSTTRDYVPSDMDLALNSLNSNMVECNSAAEKLTILNAFDIISLSNGFDLSGIFENSNKVSKFTSTNTAMTIITKLMEVAKSLDLKVITKTGGLLNMEAAESGIKGVMSINAEIFQITPNYHLVEIKKINGDILEYHNFMNQSMRPALEDIVWAWHGEQPDEK

SEQ ID NO: 10712 - protein, 45 aa, Staphylococcus epidermidis
EKGFGFIEVEGENDVFVHFSAINQEGYKSLEEGQSVEFEVVEGDR

SEQ ID NO: 10713 - protein, 280 aa, Nostoc punctiforme PCC 73102
MNSSPQKFEDLSATGDVDGGSLTVEQAIANLESEDLGLRFYAAWWLGRFRIGEPAAVTGLIKALEDEADRTPEGGYPLRRNAARALGKLGDRQAVSPLIACLDCSDFYVREAAAQSLEMLGDPVCIPALIKLLAVGLQAEQLVSQQPDLSQPYEAILEALGTLRATEFIPLVKPFLEHPIELVQYAAARAMYQLTEEPAYGERLVKALAGERLQLRRAVLADLGAIGYLPAADAIAQTLAENSLKLISLKGLLEHQVNYVTPSTLSEGAIKVINLMDSLL

SEQ ID NO: 10714 - protein, 213 aa, Oryza sativa (japonica cultivar-group)
MLACIACSSKEGGEDGSRGAATPHGRDAVKSLTSQLKDMVLKFSGSNKHQHYKAATAGSPSFRSRSYRRPYPGFIDDSAFMTTTRPGGEAYMYTRAAPPPPVRAASTSMATWDMTRSKSNRGWQQDAGRSPGGTTWIQSIEEEAGADDVTVVEDAVPREWTAQVEPGVQITFVTLPGGGNDLKRIRFSRERFGEDRAKVWWEHNRDRIQAQYL

SEQ ID NO: 10715 - protein, 418 aa, Neurospora crassa; identical to SEQ ID NO: 367

SEQ ID NO: 10716 - protein, 187 aa, Triticum aestivum
  misc_feature (106)..(106): Xaa can be any naturally occurring amino acid
  misc_feature (116)..(116): Xaa can be any naturally occurring amino acid
  misc_feature (129)..(129): Xaa can be any naturally occurring amino acid
SLPLTKEKAAFSPSDPAMQRHVASGRPSGTDGSDFSYRMVVESRYQRVAEGRSRLARLILVQALHLVAGGLLLLLSLSKGAAVNKFAVLSMAAGFLAIVVGELGRXRTMAVLLRLXTSLSSIAVAFSVXCIIRSELFLKVMKQNTEAITSYEMLDAVRVALGILLQMVVIATTTRLLQNMSPPKRAS

SEQ ID NO: 10717 - protein, 199 aa, Schizosaccharomyces pombe
MGDPTNNNDSETKPNPATYWKSRFPVARIKKIMQADQDVGKVAQVTPVIMSKALELFMQSIIQESCKQTRLHQAKRVTVSHLKHAVQSVEQFDFLQDIVEKVPDAPPIKAERKTKRPRARRAANEGEHNESVPAKKVKKNTVKEEEIEKDDESATTETPVKEEPTGEETEADHEEKASVDHGNFSDKTTSEASSASGDE

SEQ ID NO: 10718 - protein, 148 aa, Aeropyrum pernix K1
MPSSFGCSRMSVNYATLGDLKKGSYIVIDGEPCRIVEMSRAKTGKHGSAKAHVVAICVFSGQKKSLVAPVDTRVQIPVIEKRLGQVLADMGDMVQIMDLETYDTFEVEKPGGNEEEEQLAAKLQPGVTVEYWLIMGKPKIIRIRSSSS

SEQ ID NO: 10719 - protein, 112 aa, Bartonella sp. ed19224az
ANEACLKMLQEIGSIKRIPEFIARAKDKNDPFRLMGFGHRVYKNYDPRAKIMQQTCHEVLKELNIQDDPLLDIAIELENIALNDEYFVEKRLYPNVDFYSGITLKALGFPTE

SEQ ID NO: 10720 - protein, 219 aa, Aspergillus nidulans FGSC A4
MSSTSPSKEPEVEQEPQSGEEHEQMDKEQDNQTQGQGEFEVKEQDRWLPIANVARIMKLALPENAKIAKEAKECMQECVSEFISFITSEASEKCQQEKRKTVNGEDILFAMTSLGFENYAEALKIYLSKYRETQSARGEHQNRPPSSGYAGGGPVGGAASGPSVVRAGGAAAGGAFPEASDNAGSIMNQGLDPSEQDASAYGYPPMVGQGHNGAGGESY

SEQ ID NO: 10721 - protein, 419 aa, Oryza sativa (japonica cultivar-group)
MPEKFTNEGNKKVVMADGADHISALPDELLQYLLSFIPSREAVQTCVLSQRWRHQWKYVPALRINDVDSFYSVQQLNKFVHHLLLHRKRTPLYVCELDSFRNGEVAEWYQYAVSCEVEMLQVDTAHSADYCRLPEMAITSNHLTTLEFSGVQLGHISLDFSGCLKLEVLVMRGCKILVQKILSQSVRSLSITQCNFELNTRTHISAPSLISLELADILGWTPALERLPSLSTAFVRLDDRCEDYCLHSYYGDCGDQVSCGKYCTRFYDVHDDDCVLLGGLSNVTNLELITSPKVFIVRKDLLMRPTFSKLKTLLLNVSDADAGFGPLVYILRSSPVLEKLTLQLYEEPKAKIETDGSCNLEEQLVASKKLKVVEIKYSKIVVLCRVLQILNTCGVPRKKINIERTELWSFGSHFSFEQT

SEQ ID NO: 10722 - protein, 178 aa, Glycine max
  misc_feature (86)..(86): Xaa can be any naturally occurring amino acid
  misc_feature (102)..(102): Xaa can be any naturally occurring amino acid
  misc_feature (115)..(115): Xaa can be any naturally occurring amino acid
  misc_feature (125)..(125): Xaa can be any naturally occurring amino acid
  misc_feature (144)..(144): Xaa can be any naturally occurring amino acid
  misc_feature (158)..(158): Xaa can be any naturally occurring amino acid
  misc_feature (174)..(174): Xaa can be any naturally occurring amino acid
MASSMISSPAVTTVNRAGAGMVAPFTGLKSMAGFPTRKTNNDITSIASNGGRVQCMQVWPPVGKKKFETLSYLPDLDDAQLAKEVXYLLKKGWIPCLKFQLXHGFMYREHNMSPXYYYGHYWTMXKLPIFGCTDTSQVLKDLQXAKTAYLNNFIHIIXFNIIHQLHIIIFITYXPSYF

SEQ ID NO: 10723 - protein, 197 aa, Zea mays
MASPFSVPSLIMEEEGRFEAEVAEVESWWGTERFRLTKRPYTARDVVLLRGTLRQSYASGEMAKKLWRTLKAHQAGGTASRTFGALDPVQVTMMAKHLDTIYVSGWQCSSTHTCTNEPGPDLADYPYDTVPNKVEHLFFAQIYHDRKQREARMSLPRAERARAPYVDCLKPIIADGDTGFGGATATVKLCKLFRERG

SEQ ID NO: 10724 - protein, 338 aa, Mesorhizobium loti MAFF303099
MKAVICRSPGELVLEDRPAPGAPPAGWALVAVSHVGICGTDYHIFEGKHPFLAYPRIMGHEVSGTVIETGEGPDLAIGEPVVINPYLSCGKCIACRHGKPNCCVKIEVLGVHRDGAMCERILVPAQNLYPANGLSLADAAAVEFLAIGAHAVRRARADSGARALVIGAGPIGLGNAIFARIAGLDVTLLDMSSERLAFAENELGFSILDGSRGAVPDLVKDATSGEGFDVVFDATGNTRSVQSAFAHVAHGGTLVLVSVVKDDIVFSDPEFHKREMTLVGSRNALRADFDHVAASIRNGAVPLAKLVTHRTTLADTPSDLARWAHEKSGLIKAVIEIG

SEQ ID NO: 10725 - protein, 168 aa, Triticum aestivum
  misc_feature (67)..(67): Xaa can be any naturally occurring amino acid
  misc_feature (126)..(126): Xaa can be any naturally occurring amino acid
  misc_feature (134)..(134): Xaa can be any naturally occurring amino acid
  misc_feature (163)..(163): Xaa can be any naturally occurring amino acid
KGTAKWFNVTKGFGFISPEDGSEDLFVHQSAIKADGYRSLNENDVVEFEVITGDDGRTKATDVTAPXGGALAGGSRPSEGGGDRCGRGGGGYCGRGYGRGGGSYRGGGGGYSSGGGSYSGGGGYGXSGGGGRYXRSSGSRRECYKCGEEGHIFRDLPPGRSGXCGGFR

SEQ ID NO: 10726 - protein, 1168 aa, Neurospora crassa
MSTAFQTTPNQSISVSATTSPSNRQYSSFHPGPTTREGPGSGYYANQHNAGQSSPHTSSQPHSRRPSAYDQPTGLEPHMSARTAFAQSIPAPVTSIASDQPPSSSDRRRNNMPTAVPPRTSSRHDPNTSSRRAQQAADRAAASRQSNTNGTMDPAVVDEAAARSRRQHQMTQDAHQRTTSSRGNPTPTSLPVRSQPNATSSRQQSSREASEILNNILIQQPEIDIERERERLAQAQAQAHAQAQAQAQAQAQAQAQQASNYNHHHRQETASQAMAAPGGDHGEESRRGHRSRHDHSKREKHTKFGEYILGNTIGEGEFGKVKLGWKQEGGVQVAIKLIKKDTVGNNPSRMAKIMREVAILKQLTHPNIVRLHKMEESDRHYGIVLEYASGGELFDYILNHRYLKDNAARRLFAQLVSGVGYLHKKGIVHRDLKLENLLLDRNRNIIITDFGFANTFDPNQELSEEEELNLSDREFVKRMGLDKVNDAGWRKGDLMQTSCGSPCYAAPELVVSDSLYTGRKVDVWSCGVILYAMLAGYLPFDDDPANPEGDNINLLYKYIVNTPLTFPEYVTPHARDLLRRILVPNPRKRADLFEVARHSWLSEYSHVVEFITSSTTTPSEIQNTTVPAEDEGESPHLARSASVREAPKKSTASPAIGGLVSKQGTVDPEAEAAYAKQQRDNKRRTVQVEYVAPNTTTQRGDIAGQQQPSSNANRNRNESQAPVESSDSRPTTSAKDKQLSQGPSAPKDAYNNKPPVSSRRPPSSQRNGGNAPTTGNAVAPPRPSRDGRPTADNQYLSGAAGAPTQRPTTGGSMQSGRPSYAQPAPPEVADANVHGRIQQPSKGSGSSHFGVPTTTPAEQQPSESADYGRPSISTGSRFDKVREDGVVKGHKRSSTMGEIGGKLFGRSGSLFGGRKSKRQQELQQAGEKTKRYPPVSMNNSMPGGENGSRPSLDSKRSRRSFSMGMGKKSSGGSITGSNGSQEKSNKRFSFIPPSLSRAFGYNKEDEPPALDSQQDLPIQEPSSVDQFLGREQNVSATTVDGMYTQLQDSQQGSPAVNTQYQYGRPSASQGFMPGTMPNAGSDPSVNSMPQAPGSTPQLQTMTQQDGLYDARKGNSRANRGVLQKNKRFVDYEGDGFARPHDHSGSSGPARKVMDFFRRRGKARGGENN

SEQ ID NO: 10727 - protein, 390 aa, Phlebia radiata
MAFNFAAILAFVSLAAVTSAAPSKTTCSNGVVVPDAVCCDFVPLASALQSEVLMGDCGEDAHELVRLIFHDAIAISQSMGPSAGGGADGSMLIFPTVEPAFFPNLGIADSVNNLIPFLSQFPTISAGDLVHFAGAVAISNCPGAPQLEFLAGRPNATAPAIDGLIPEPQDDVTKILARFKDAGNFSPAEVVALLASHSIARADHVDPTLDAAPFDSTPFDFDTQVFLEVLLKGVGFPGLANNTGEVSSPLPVTDGTDVGELRLQSDFALARDERTACAWQSFVNEQEAMATAFKNAVKKLAVLGHNRNDLVDCSAVVPVPKPATGTPATFPASTGPQDLELTCTTEPFPTLSTAPGAQQTLIPHCSDGTMTCNSVQFDGPATNFGGADDS

SEQ ID NO: 10728 - protein, 153 aa, Zea mays
  misc_feature (21)..(21): Xaa can be any naturally occurring amino acid
  misc_feature (23)..(23): Xaa can be any naturally occurring amino acid
  misc_feature (75)..(75): Xaa can be any naturally occurring amino acid
  misc_feature (78)..(78): Xaa can be any naturally occurring amino acid
  misc_feature (81)..(81): Xaa can be any naturally occurring amino acid
  misc_feature (94)..(94): Xaa can be any naturally occurring amino acid
  misc_feature (98)..(98): Xaa can be any naturally occurring amino acid
  misc_feature (105)..(105): Xaa can be any naturally occurring amino acid
  misc_feature (108)..(108): Xaa can be any naturally occurring amino acid
  misc_feature (118)..(118): Xaa can be any naturally occurring amino acid
MASSMLSSAAVVTSPAQATMXRXPFTGLKSSSAFPVTRKANNDITSIVSNGGRVSCMKVWPPVGKKKFETLSYPXLTXTEXELGKEVDYLLRHXWIPXCVEFELXHGXVYREHGSTPXYYDGRYWNNGGSFPLVRMALPLPGLKGSRGQNGVP

SEQ ID NO: 10729 - protein, 407 aa, Gloeobacter violaceus PCC 7421
MSRVLFRQVRRLDPDTGTDSIADWLWDSATGRAEPTGDPAVRADRAIDGAGRLILAPTLCDLYVRSGEPGHEEREDLASLAAAAAAGGYSQVAILPHTEPPVDDPAQVDFLRRHFPAGPVEALVLGAISRNCAGEALAEVSSLLEAGVVGFTDARPLANWALLRRFLDYAAVLERPVLVWPCFAPLATGIALEGDWAIRLGLAGRPPQAEGIALAGVLELVRLTGTAVHLMRLSTARSVEMAAQAKADGLPVTASTTVHHLVHASPDLAEYDPNLRFEPPLGNPADRAALVAALEAGIIDAVASDHTPWTYEEKTLPFSQAPPGAIALELVLPLVWNLVREGRLTPLRAWEALSSAPRRILALKHPQVLVLFDPDKTWVPGTDTLHSRSLATAWLGRTVQGRVLEVF

SEQ ID NO: 10730 - protein, 430 aa, Haemophilus influenzae R2866
MMDEQSLLAFDTQHIWHPYSSVSSDMPLYAVERADGVMITLKDGRRLIDGMSSWWAALHGYNHPRLNAAAQNQLAKMSHIMFGGFTHDPAVELAQLLVQILPNGLDKIFFADSGSVAVEVAMKMAIQYQHAKGEVQRQKFATIRSGYHGDTWNAMSVCDPTTGMHHLFHHSLPVQYFLPQPNIPFNESWNDCVIEPLADLLKKKGSEIAALILEPVVQGAGGMYFYSPTYLVKAQALCKQYGVLLIFDEIATGFGRTGKLFAAEHAGISPDIMCIGKALTGGYLTLSASITTTEIAQTICSGEAKCFMHGPTFMANPLACAIATESIRLLLESPWQQNIQRIEHYLKQQLSPLSEKDYVKEVRVLGAIGVVEMKSAVNMKTLVPRFVEQGVWIRPFGKLVYVMPPFVIKDDELQKLTEGMILALIQEYEH

SEQ ID NO: 10731 - protein, 481 aa, Gibberella zeae PH-1
MAVGSSKQINFTEFYNLIDGKLETTKETLQNTNPSTLEKNHPAPVATQEDVDRAVEAAKKASESWSEVPWEERQALVTKYAEGIDALKDEFAHLLVKEQGKSLAMAHFEIMLSVQFLKGYASLPDPQRVIEDKPDCKVVTKYVPLGVAVGIVPWNFPIFLTTAKIGPALIAGNSFILKPSPFTPYCGLKLAELASQYFPSGVVQALSGDDNLGPWLTAHPGVDKISFTGSTATGKKVVASAAPTLKRVTLELGGNDPSIVCDDVDVKEVAPKIAFAALMNSGQLCMAIKRVYVHESIYDDFVKELAAAVNSFTVGDGMDEKTSLGPVQNQMQFDRVKNLLADIESNGYKLAAGSTSASTAGKGYFITPTIVENPPDESRIVVEEPFGPVFPVLKWTDEADVLRRANDTDMGLSASVWTKDMEKAERLSSKIKAGTVWVNNHVQLNPAVPFGGAKHSGHGAEHGIEGIKAYCTTKSLYFNKA

SEQ ID NO: 10732 - protein, 381 aa, Arabidopsis thaliana
MTNHLQDPLPTYPKPVLTKEEQEVDEKMVSLQAESIVNTVAFPMVLKAAFELGVIDTIAAAGNDTWLSPCEIACSLPTKPTNPEAPVLLDRMLSLLVSHSILKCRMIETGENGRTGKIERVYAAEPVCKYFLRDSDGTGSLVPLFMLLHTQVFFKTWTNLKDVILEGRDAFNSAHGMKIFEYINSDQPFAELFNRAMSEPSTMIMKKVLDVYRGFEDVNTLVDVGGGNGTVLGLVTSKYPHIKGVNFDLAQVLTQAPFYPGVEHVSGDMFVEVPKGDAVFMKWILHDWGDEDCIKILKNCWKSLPEKGKIIIVEFVTPKEPKGGDLSSNTVFAMDLLMLTQCSGGKERSLSQFENLAFASGFLRCEIICLAYSYSVIEFHK

SEQ ID NO: 10733 - protein, 490 aa, Leuconostoc mesenteroides
MEIQNKAMLITYADSLGKNLKDVHQVLKEDIGDAIGGVHLLPFFPSTGDRGFAPADYTRVDAAFGDWKDVEALGEEYYLMFDFMINHISRESVMYQDFKKNHDDSKYKDFFIRWEKFWAKAGENRPTQADVDLIYKRKDKAPTQEITFDDGTTENLWNTFGEEQIDIDVNSAIAKEFIKTTLEDMVKHGANLIRLDAFAYAVKKVDTNDFFVEPEIWDTLNEVREILTPLKAEILPEIHEHYSIPKKINDHGYFTYDFALPMTTLYTLYSGKTNQLAKWLKMSPMKQFTTLDTHDGIGVVDARDILTDDEIDYASEQLYKVGANVKKTYSSASYNNLDIYQINSTYYSALGNDDAAYLLSRVFQVFAPGIPQIYYVGLLAGENDIALLESTKEGRNINRHYYTREEVKSEVKRPVVANLLKLLSWRNESPAFDLAGSITVDTPTDTTIVVTRQDENGQNKAVLTADAANKTFEIVENDQTVMSSDNLTQN

SEQ ID NO: 10734 - protein, 381 aa, Arabidopsis thaliana
MSNHLQDPLTTYPKPGLTKEEQEIDEKMVSLQAESIVNAVAFPMVLKAALELGVIDTIAAASNGTWLSPSEIAVSLPNKPTNPEAPVLLDRMLRLLVSHSILKCCMVESRENGQTGKIERVYAAEPICKYFLKDSDGSGSLSSLLLLLHSQVILKTWTNLKDVILEGKDAFSSAHDMRLFEYISSDDQFSKLFHRAMSESSTMVMKKVLEEYRGFEDVNTLVDVGGGIGTILGLITSKYPHIKGVNFDLAQVLTQAPFYPGVKHVSGDMFIEVPKGDAIFMKWILHDWGDEDCIKILKNCWKSLPEKGKVIIVEMITPMEPKPNDFSCNTVLGMDLLMLTQCSGGKERSLSQFENLAFASGFLLCEIICLSYSYSVIEFHK

SEQ ID NO: 10735 - protein, 45 aa, Staphylococcus intermedius
EKGFGFIEVEGENDVFVHFSAINQDGYKSLEEGQAVEFEVVEGDR

SEQ ID NO: 10736 - protein, 493 aa, Pseudomonas syringae pv. tomato str. DC3000
MSLTRFQMCIDGQWVDALSGKTFDSLNPALAEPWAQLPDAGEADVERAVQAAQKAFESQEWRGLTATARGKLLRRLGDLIAENKEHLAQLESRDNGKLIRETRGQVSYLPEFFHYTAGLADKLEGGTLPLDKPDLFAYTVHEPMGVVAGIIPWNSPLYLTAIKLAPALAAGNTIVLKPSEHASATVLELARLALEAGIAPGVVNVITGYGPTTGAALTRHPLVRKIAFTGGAATARHVVRSSAENFAKLSLELGGKSPNIIFADADLDSAINGAVAGIYAASGQSCVSGSRLLVQDEIYDEFVERLAERASRIRIGNPLDESTEMGPMATAQQLAVVEGLVADALAEGARLRLGGKRPELDSKGWFYEPTLFECDHNSMKIMQEEVFGPVASVIRFKDEAEALAIANDSQFGLAAGIWTRDLGRAHRLARDIRSGIIWVNTYRAVSAMAPIGGFKNSGYGRESGIDSVLAYTELKTVWINLSQAPMPDPFVMR

SEQ ID NO: 10737 - protein, 281 aa, Clostridium tetani E88
MDLWLKEGQISDAVMTYKIKETLVRKKTEYQDLAIVDTYALGRMLVLDGIVQTSIKDEYVYHEMITHIPLYTHPNPKKVLVVGGGDGGTIREILKHPSVEKAVLCEIDEEVVKECKKHLPEISNNALEDSRCEVFIGDGIKYVNEHKNEFDVVIIDSTDPFGAAEGLFGGSFYGKISECLTEDGIFVAQTETPFYLPEIVKRVYDDSKAVFPVTKLFMAAIPTYPSGYWSFTIGSKKHDPEKAPVPEVLPFETKYYTPRLHSASFVLPKFVENLIFANISE

SEQ ID NO: 10738 - protein, 45 aa, Streptococcus pyogenes
EKGFGFISTENGQDVFAHFSAIQTNGFKTLEEGQKVAFDVEEGQR

SEQ ID NO: 10739 - protein, 217 aa, Oryza sativa (japonica cultivar-group)
MASTELASDVYALPCGDDGTTALSTPVVVSVLASLLERHIARNERDQAAAADGEAARRARAFDSGTVLDMSLHAFLERFSRYANVSPQVYVVAYAYLDRLRRGDGVRVVSANAQRLLTTAILVASKFVEDRNYKNSYFAAVGGLTAAELSSLELDFLFLMQFRLNVSVSVFQSYCRHLEREVSYGGGYQVERCLKKALVCSGEAQAQQRQAASAAAQ

SEQ ID NO: 10740 - protein, 370 aa, Glycine max
  misc_feature (89)..(89): Xaa can be any naturally occurring amino acid
  misc_feature (154)..(154): Xaa can be any naturally occurring amino acid
  misc_feature (188)..(188): Xaa can be any naturally occurring amino acid
  misc_feature (313)..(313): Xaa can be any naturally occurring amino acid
METVLFNHSPPLEFKGLSKEEEDSLLGQVEIWRYMTCFTDSVALKAVIELRIADILDRYGKPLSLSQIVENIEDAPSPDASLLQRVLRXMVRRKIFSAQESETGETLFGLTRASKWILRDTKMTLAPMLLLENHPIHLNPAHYISEIIREGTKXALAFFKCHGHEQFEMTGLDPEYNRLFNEGMVCTXARVVSKAVITGYKDGFNQIKSLVDVGGGIGGSLSEIVRAYPHINAINFDLPHVVATAPKFDGITHVGGDMFVSIPSADAIYMKWILHDWSDEHCIKILKNCRKAIPEKTGKVIIVDHVLRPEGQXLFTDVGIAFDMMLLAHNAGGKERTEENWKWLFKETGFARYNIIKINALPSIIEAFPI

SEQ ID NO: 10741 - protein, 46 aa, Salmonella enterica subsp. enterica serovar Virchow
DKGFGFITPDDGSKDVFVHFSAIQNDGYKSLDEGQKVSFTIESGAK

SEQ ID NO: 10742 - protein, 130 aa, Nostoc punctiforme PCC 73102
MSAATDQILEQLKTLSLLEASELVKQIEEAFGVSAAAPVGGMMMMAGPGGAAPAEEAVEQTEFEVILDSVPADKKIAVLKIVRELTGLGLKEAKDLVEAAPKAVKEGIAKDAAEDAKKRIEEAGGKVTIK

SEQ ID NO: 10743 - protein, 46 aa, Yersinia enterocolitica
DKGFGFITPADGSKDVFVHFSAIQSNDFKTLDEGQKVEFSIENGAK

SEQ ID NO: 10744 - protein, 476 aa, Pseudomonas syringae pv. tomato str. DC3000
MYPDVQLYIDGQWRASRDGRSIPVIDPATGQSLGSVAHAGIADLDEALSAAERGFATWRATSAYDRYKLMQKAADLVRERADSIARIMTQEQGKPLAEARMETLSAADVIDWLAEEGRRSYGRIVPSRGVSIEQKVIKEPVGPVAAFTPWNFPINQVVRKLSSALAAGCSIIVKAPEETPGSPAELIRAFADAGVPAGVIGLVYGDPAEISGYLIPHPVIRKVTFTGSTPVGKQLAALAGKHMKRATMELGGHAPALVFDDADIDLAARVLATAKFRNAGQVCVSPTRILVQRKVLQAFTEKFVGLTREIKVGNGLESGTTMGPVANDRRIPALVDLIEDAVSAGATVSAGGKAVEGQGYFFEPTVLSGLTPAMRIMNEEPFGPVALLVPFDTVEEAIVESNRVPFGLASYAFTTSMKTAQALSTYIEAGMLSINHQGIGLPEVPFGGIKDSGYGSEGGTEAIEAYLNTKLVTQYS

SEQ ID NO: 10745 - protein, 499 aa, Streptomyces avermitilis MA-4680
MTPGTPGNPAAPVTPGASDAQRLFIGGEWVAPDGGHYEVIDPATEAVVGWAPEASRDQVHAAAAAAREAFAAWSRTPAEERAAVLGRAAEVMRRNLVPYAELAQAESGATTGTARGMQVGVGAARFRRYARVEPAEEPIAPQINEAGPFGRAAVMGALAVRQPVGVVTCITSYNNPWANPAGKIAPALAMGNTVVVKPAPQDPLSVYRMAEALQAAGVPPGVVNVVSGSGAQAGEAAVDCPDVDMVSFTGSTAVGQRIAEVCGRGMKRQLMELGGKGAALVFEDADLASAVSGIGTTFSFYSGQICTAPTRVLAQRGVYDRVVDQLAAYARRLPVGDPRAPGTVVGPVISAAHRDRVESYVELGRKEGARVVTGGERPPCATGFYVAPTLLADCTTDMRVVREEIFGPVVAVLPFDDEEEGIELANSSDYGLIDYVWSADVARAFRVARRLRAGGVGVNTVGRNMEAPFGGFKRSGVGRDVGSYALHAYSELQAIVWPG

SEQ ID NO: 10746 - protein, 398 aa, Glycine max
MSLTLQTPPSTTLSSASPIHRTITRYTTFSFSLRPPTTLHFNPHRSLPLIRASNSSINAASTTELDAVSAFSEIVPDTVVFDDFEKFPPTAATVSSSLLLGICGLPDTIFRNAVEMALADSECYGLENPNARLSCFVNKAFANIGSDMAKLVPGRVSTEVDARLAYDTHAIIRKVHDLLKLYNDSNVPPQRLLFKIPSTWQGIEAARLLESEGIQTHLTFVYSFAQAAAAAQAGASVIQIFVGRIRDWARNHSGDTEIESAQLRGEDPGLALVTKAYNYIHKYGHKSKLMAAAVRNKQDLFSLLGVDYIIAPLKVLQSLKESVASPDEKYSFVRRLSPQSAAKYTFSDEELVRWDEDSLSKAMGPAAVQLLAAGLDGHADQAKRVEELFGKIWPPPNV

SEQ ID NO: 10747 - protein, 308 aa, Pseudomonas putida KT2440
MTSKLEQLKQFTTVVADTGDLDAITRLKPVDATTNPSLLLKAAAIPGYADLLKQVKADAKGNVDLACDKFAVAVGSGILKVIPGRISTEVDARLSFDEPALLNKARQLIALYEAAGVAKERVLIKLASTWEGIRAAEQLEKEGIQTNLTLLFSFAQAQACADAGVFLISPFVGRIYDWYKKSTGQEYVGAEDPGVQSVTRIYNYYKANGYNTVVMGASFRNIGQIEQLAGCDRLTISPELLQQLSDDQGELPQVLKPGNAGEAKQHLNESQFRWAMNEDAMGTEKLAEGIRQFARDQEKLEKLIAEKA

SEQ ID NO: 10748 - protein, 416 aa, Deinococcus radiodurans R1
MTITITNIKRVGSEQTESLTIENGLIKGWNLPAEGEIFDGQGGTLAPALIELHAHLREPGQTEKEDLASGLAAASAGGYGTVVCMPNTRPVIDDPALVRSLIEKARGLGFARLRPAAAVTKGEKGEQLTEMSYLKEAGAVMFTDDGLTNENARVLRLGMEYAKSLGMVISVHAEDDALRAGGVMNEGPVSESLGLPGNPAAAAAARVARDMEIVALTGARLHVQHLSTARELDIVRDAKRRGLPVTCEVCPHHLDLTDESLRTFDAMYKVAPPLRTRADADYLLEGLLDGSVDCIATDHAPHTRAEKERDLLDAPSGIAYIEIAFPIMWTRFGERLGLEKLIDLMTAGPARVMGWPEPSLEAGAPADMVVLDLETEREVNPAEFKSKAKFTPWQGQKLRGFPLLTVVDGKVAYRRE

SEQ ID NO: 10749 - protein, 159 aa, Burkholderia cepacia R18194
MSTLYSFSAETLAGAPASLDAYRGKVLLIVNTASECGFTPQYAGLQKLYDQYAARGFYVLGFPCNQFGKQEPGDAAQIGAFCERNYGVTFPMFAKIDVKGDHAHPLYRYLTDEAPGILGLKAIKWNFTKFLVDREGRIVKRYAPSTKPDEIAADIDKLL

SEQ ID NO: 10750 - protein, 161 aa, Brassica napus
  misc_feature (2)..(2): Xaa can be any naturally occurring amino acid
  misc_feature (20)..(20): Xaa can be any naturally occurring amino acid
  misc_feature (24)..(24): Xaa can be any naturally occurring amino acid
  misc_feature (26)..(26): Xaa can be any naturally occurring amino acid
  misc_feature (30)..(30): Xaa can be any naturally occurring amino acid
  misc_feature (33)..(33): Xaa can be any naturally occurring amino acid
  misc_feature (36)..(36): Xaa can be any naturally occurring amino acid
  misc_feature (38)..(38): Xaa can be any naturally occurring amino acid
  misc_feature (42)..(42): Xaa can be any naturally occurring amino acid
  misc_feature (48)..(52): Xaa can be any naturally occurring amino acid
  misc_feature (54)..(54): Xaa can be any naturally occurring amino acid
  misc_feature (58)..(58): Xaa can be any naturally occurring amino acid
  misc_feature (60)..(63): Xaa can be any naturally occurring amino acid
  misc_feature (78)..(78): Xaa can be any naturally occurring amino acid
  misc_feature (80)..(80): Xaa can be any naturally occurring amino acid
  misc_feature (86)..(86): Xaa can be any naturally occurring amino acid
  misc_feature (92)..(95): Xaa can be any naturally occurring amino acid
  misc_feature (99)..(99): Xaa can be any naturally occurring amino acid
  misc_feature (104)..(105): Xaa can be any naturally occurring amino acid
  misc_feature (109)..(109): Xaa can be any naturally occurring amino acid
  misc_feature (121)..(121): Xaa can be any naturally occurring amino acid
  misc_feature (123)..(124): Xaa can be any naturally occurring amino acid
  misc_feature (127)..(127): Xaa can be any naturally occurring amino acid
  misc_feature (129)..(129): Xaa can be any naturally occurring amino acid
  misc_feature (131)..(134): Xaa can be any naturally occurring amino acid
  misc_feature (143)..(145): Xaa can be any naturally occurring amino acid
  misc_feature (148)..(148): Xaa can be any naturally occurring amino acid
  misc_feature (150)..(150): Xaa can be any naturally occurring amino acid
  misc_feature (152)..(152): Xaa can be any naturally occurring amino acid
  misc_feature (155)..(156): Xaa can be any naturally occurring amino acid
  misc_feature (160)..(160): Xaa can be any naturally occurring amino acid
MXSSMLFLRCVSPTSPGHAXMVAXFXGLKXSAXFPXTXLADXDITSIXXXXXRXSCMXVXXXXGKKKFETLSYLPDLXEXELTEEXEYLLRXXXXPCVXFELQXXFVYXEHVCTPGYDDGXYXXRWXVXLXXXXDSARVMKEXXXVKXGXPXAFXXIIGXD

SEQ ID NO: 10751 - protein, 199 aa, Zea mays
MEDEEHEVYGQEIPVDGEDVDMSAGDDATKLQELDEMKRRLKEMEEEAAALREMQAKVAKDMQDPNATTSENKEEMDSRSVFVGNVDYACTPEEVQQHFNSCGTVNRVTILTDKFGQPKGFAYVEFVEVEAVQEAIKLNESELHGRQLKVAPKRTNVPGMKQPRGRGFNPYRPYGYSPYGYGYGYGRFPRFRRPRRPYF

SEQ ID NO: 10752 - protein, 107 aa, Triticum aestivum
  misc_feature (28)..(28): Xaa can be any naturally occurring amino acid
  misc_feature (32)..(33): Xaa can be any naturally occurring amino acid
  misc_feature (49)..(50): Xaa can be any naturally occurring amino acid
  misc_feature (61)..(61): Xaa can be any naturally occurring amino acid
  misc_feature (63)..(63): Xaa can be any naturally occurring amino acid
  misc_feature (78)..(78): Xaa can be any naturally occurring amino acid
  misc_feature (80)..(80): Xaa can be any naturally occurring amino acid
  misc_feature (87)..(87): Xaa can be any naturally occurring amino acid
  misc_feature (93)..(93): Xaa can be any naturally occurring amino acid
  misc_feature (98)..(99): Xaa can be any naturally occurring amino acid
  misc_feature (103)..(103): Xaa can be any naturally occurring amino acid
  misc_feature (106)..(106): Xaa can be any naturally occurring amino acid
VPVEPHLGCSSNILRGGEGASPEGFSGXPGAXXNPPAAGDGGLPGGVNXXKQPGWGGPFPXSXHAHGIQFRLYALDDXFXLGNKVTXDKFMEXIEGHXXGEAXITXV

SEQ ID NO: 10753 - protein, 422 aa, Staphylococcus aureus subsp. aureus MRSA252
MTAEKITQGTEGLNVPNEPIIPFIIGDGIGPDIWKAASRVIDAAVEKAYNGEKRIEWKEVLAGQKAFDTTGEWLPQETLDTIKEYLIAVKGPLTTPIGGGIRSLNVALRQELDLFTCLRPVRWFKGVPSPVKRPQDVDMVIFRENTEDIYAGIEFKEGTTEVKKVIDFLQNEMGATNIRFPETSGIGIKPVSKEGTERLVRAAIQYAIDNNRKSVTLVHKGNIMKFTEGSFKQWGYDLALTEFGDQVFTWQQYDEIVEKEGRDAANVAQEKAEKEGKIIIKDSIADIFLQQILTRPAEHDVVATMNLNGDYISDALAAQVGGIGIAPGANINYETGHAIFEATHGTAPKYAGLNKVNPSSVILSSVLMLEHLGWQEAADKITDSIEDTIASKVVTYDFARLMDGAEEVSTSAFADELIKNLK

SEQ ID NO: 10754 - protein, 283 aa, Triticum aestivum
  misc_feature (135)..(135): Xaa can be any naturally occurring amino acid
  misc_feature (198)..(198): Xaa can be any naturally occurring amino acid
MAKTYPVVSAEYQEAVEKARQKLRALIAEKNCSPLMLRLAWHSAGTFDVSSKTGGPFGTMKKPAEQAHAANAGLDIAVRMLEPIKEEIPTISYADLYQLAGVVAVEVSGGPVIPFHPGREDKPQPPPEGRLPDAXQGSDHLRQVFGKQMGLSDQDIVALSGGHTLVSLHICSICFHVIYLDRCMHALTLFSCVSLFLXGRCHKERSGFEGPWTRNPLKFDNSYFTELLSGDKEGLLQLPSDKTLLTDPVFRPLVEKYAADEKAFFEDYKEAHLRLSELGYAEA

SEQ ID NO: 10755 - protein, 373 aa, Staphylococcus aureus subsp. aureus MRSA252
MAELQRGLEGVIAAETKISSIIESQLTYAGYDIDDLAENAQFEEVIFLLWNYRLPNEEELAHLKGKLNQYMTLNPRVYTHFEEYVTDHVHPMTALRTSLSYIAHFDPDAENESDENRYERAMRIQAKVASLVTAFARVRQDKEPIKPNPDLSYAANFLYMLRGELPTDIEVEAFNKALILHADHELNASAFTARCAVSSLSDMYSGIVAAVGSLKGPLHGGANEQVMTMLSEIGSIENVDAYLDEKFANKDKVMGFGHRVYKDGDPRAKYLREMSRQITKDAGREELFEMSVKMEKRMAEEKGLIPNVDFYSASVYHCMEIPHDLFTPIFAVSRSAGWIAHILEQYKDNRIMRPRAKYIGETNRKYIPLEERK

SEQ ID NO: 10756 - protein, 486 aa, Pseudomonas putida
MKEIKHFINGEYVESASGKLFDNVNPANGQVIAKIHEAGEAEVDAAVKAARAALKGPWGRMTVAERTEILHRVAAGISARFDEFLEAECLDTGKPKSLASHIDIPRGAANFSVFADLVKNVPTEAFEMATPDGTGALNYGVRRPKGVIGVISPWNLPLLLMTWKVGPALACGNTVVVKPSEETPTTTALLGEVMNAAGVPAGVYNVVHGFGGNSAGAFLTAHPDVDAYTFTGETGTGETIMRAAAKGLRQVSLELGGKNAGIVFADCDLDKAIEGTLRSAFANCGQVCLGTERVYVERSIFDEFVARLKAGAEALVIGPPDDASSNFGPLVSLKHREKVLSYYQQAVDDGATVVTGGGVPEMPAHLAGGAWVQPTIWTGLADNSVVVTEEIFGPCCHIRPFDREEEAIELANSLPYGLASAIWTENASRAHRVAGQIEAGIVWVNSWFLRDLRTAFGGSKQSGIGREGGVHSLEFYTELKNICVKL

SEQ ID NO: 10757 - protein, 346 aa, Glycine max
LEPLGVVGHITPWNFPNTMFYIKVAPSLAAGCTMVLKPAEQTPLSALFNAHLAKLAGIPDGVINVVPGFGPTAGAALSSHMDVDKVSFTGSTQTGREIMQAAAKSNLKQVSLELGGKSPLIIFDDADIDKAAELALLGILYNKGEVCVASSRVLVQEGIYDEFEKKLVEKAKAWVVGDPFDPKVQQGPQVDKEQFEKVLSYIEHGKKEGATLLTGGKTVGNKGYFIEPTIFSNIREDMLIAQDEIFGPVMALKKFKTIEEAIKSANNTKYGLAAGIVTKNLDTANTVSRSIRAGTIWINCYFAFGDDVPFGGYKMSGFGKDHGLEALHKYLQVKSVVTPLYNSPWL

SEQ ID NO: 10758 - protein, 128 aa, Brassica napus
MATVGRNIAAPLLFLNLIMYLIVLGFASWCINKYINGQTNHPSFGGNGATPFFLTFSILAAVIGIASKLAGGNHIRFWRNDSLAAAGSASIVAWAVTALAMGLACKQINIGGWRGWRLRMIEAFIIIY

SEQ ID NO: 10759 - protein, 428 aa, Pseudomonas aeruginosa PAO1
MADKKAQLIIEGSAPVELPVLSGTMGPDVVDVRGLTATGHFTFDPGFMSTASCESKITYIDGDKGVLLHRGYPIEQLAEKSDYLETCYLLLNGELPTAAQKEQFVGTIKNHTMVHEQLKTFFNGFRRDAHPMAVMCGVIGALSAFYHDSLDINNPKHREVSAHRLIAKMPTIAAMVYKYSKGEPMMYPRNDLNYAENFLHMMFNTPCETKPISPVLAKAMDRIFILHADHEQNASTSTVRLAGSSGANPFACIASGIAALWGPAHGGANEAVLRMLDEIGDVSNIDKFVEKAKDKNDPFKLMGFGHRVYKNFDPRAKVMKQTCDEVLQELGINDPQLELAMKLEEIARHDPYFVERNLYPNVDFYSGIILKAIGIPTSMFTVIFALARTVGWISHWQEMLSGPYKIGRPRQLYTGHTQRDFTALKDRG

SEQ ID NO: 10760 - protein, 282 aa, Bifidobacterium longum DJO10A
MLEPPVTPIRKANDGLELPATGFGTYKVNGLAGVDAIKSAIHQGYRLIDSAFNYENEGVVGRAIRESGVPREDIIVTSKLPGRHHAHDEALLTIEESVCRMGLDYIDLYLIHWPNPSQGQFVEAWEALVEARERGLVKHIGVSNFLPGHIDLLIRDTGVTPAVNQVELHPYFQQREQLAYDNAHGIITEAWSPLGRANQMLRDPDLKRIAAKHGISVVQAILRWHLQYGDVAIPKSLNPERQRQNLDLTAFELDDQDMADIAAMDNPEGHTFGQNPHWHEEA

SEQ ID NO: 10761 - protein, 237 aa, Fischerella sp. PCC 7603
MTEATAEEYSPTNAPPLTKEQALSNLQSPDLSLRYYAAWWLGKFRVRSPAVVDALLAALEDETDRTEMGGYPLRRNAARALGKLGDLRAVPGLIKCLQCSDFYVREAAAQSLAMLKDKRAAQALMQLLEPGVAAAVQVPGRPHLTQPYEAILEALGAMGATEAIPLIEPFLEHPMPRVQCAAARAMYQLTRDFCYGEYLVKMLDSSNLQLRRVALADLGAIGYMPAAEAIAAGQGRK

SEQ ID NO: 10762 - protein, 400 aa, Zea mays
MYSLGRKLGQGQFGTTYLCVDKATGLEYACKSIAKRKLVTDEDVEDVRREIQIMHHLAGHPNIIAIRGAYEDSVAVHVVMELCAGGELFDRIVRRGHYTERQAGELARVIVAVVESCHSLGVMHRDLKPENFLFVGNDEESPLKTIDFGLSMFFRPGEEFTDVVGSPYYVAPEVLKKRYGQEADVWSAGVIIYILLCGVPPFWAETEQGIFEQVLHGSLDFDSDPWPSVSGDAKDLLRKVLVRDPKKRLTAHQVLCHPWLQTIASAPDKPLDSAVLSRLKQFSAMNKLKKMALRVIAENLSEEEIAGLKEMFKMMDTDNSGQINFEELKAGLEKVGANMKESEIYQLMQAADIDNSGTIDYGEFIAATLHLNKIEREDHLFAAFQYFDKDGSGYITADEL

SEQ ID NO: 10763 - protein, 165 aa, Aegilops speltoides
VMASSATTVTPFHGLKSTAGLPVSRRSSGSLGRVSNGGRIRCMQVWPIEGIKKFETLSYLPPLSTEALLKQVDYLIRSKWVPCLEFSKVGFVFREHNSSPGYYDGRYWTMWKLPMFGCTDATQVLNEVEEVKKEYPDAYVRVIGFDNLRQVQCVSFSAFRPPGCE

SEQ ID NO: 10764 - protein, 165 aa, Aegilops speltoides
VMASSATTVTPFHGLKSTAGLPVSRRSSGSLGRVSNGGRIRCMQVWPIEGIKKFETLSYLPPLSTEALLKQVDYLIRSKWVPCLEFSKVGFVFREHNSSPGYYDGRYWTMWKLPMFGCTDATQVLSEVEEVKKEYSDAYVRVIGFDNLRQVQCVSFIAFRPPGCE

SEQ ID NO: 10765 - protein, 213 aa, Arabidopsis thaliana
MGCFHSKAAKEFRGHEDPVKLASETAFSVSEVEALFELFKSISSSVVDDGLINKEEFQLALFKSRKRENIFANRIFDMFDVKRKGVIDFGDFVRSLNVFHPNASLEDKIDFTFRLYDMDCTGYIERQEVKQMLIALLCESEMKLADETIEIILDKTFEDADVNQDGKIDKLEWSDFVNKNPSLLKIMTLPYLRDITTTFPSFVFHSEVDEIAT

SEQ ID NO: 10766 - protein, 165 aa, Aegilops speltoides
VMASSATTVTPFHGLKSTAGLPVSRRSSGSLGRVSNGGRIRCMQVWPIEGIKKFETLSYLPPLSTEALLKQVDYLIRSKWVPCLEFSKVGFVFREHNSSPGYYDGRYWTMWKLPMFGCTDATQVLSEVEEVKKEYPDAYVRVIGFDNLRQVQCVSFIAFRPPGCE

SEQ ID NO: 10767 - protein, 435 aa, Zea mays
MSQRDGDLTGAHPEEGDRHAVRMDGSDDDELDQPTSKATEHITAMDVRKGKDMQGIPWNVMPTTRDKYRQSRLQGYANFENVPNSGRLSEKECMPAEKGQLYYEFQHSTRSVKPTIRHFQLRNLVWATTRHDVYLMSNFSVLHWSAMTCKKQEVINLLGHVTPCEKHHRNYYEGFYRTPVSTLAVKHNLLVTGGFHGEIICKFLDRQGVSYCCKTTNDDDGITNSLEIFEKPSGSLHFLASNNDCGLRDFDMEKFRICNHFHFAWPVNHTSLSPDGKLAAIVGDSPDGLLIDANSGKTVHKLHGHLDYSFASAWNPDGRTFATGNQDKTCRVWDVRNLSRSVVVLGGNIGAVRSIRYTPDGKFMAMTEPADFIHIFDVESGYSRKQELDFFGEIAGISFSPDTEALFVGVHDRFFSCCLLQFNRRRFYSYLDSTL

SEQ ID NO: 10768 - protein, 488 aa, Listeria monocytogenes EGD-e
MADVRKLKNYIDGEWVESKTDKYEDVINPATGEVLCQVPISTRAELDQAAVIAEQAFEKWSQVAVPRRARVLFGFQQLLIQHKEELARLITLENGKNLSEARGEVQRGIENVEFAAGAPTLMMGDSLASIATDVEAANYRYPVGVVGGIAPFNFPMMVPCWMFPMAIALGNSFILKPSERTPLLMEKLVELFSEAGLPKGVFNVVYGAHDVVNGILENEIIKAVSFVGSKPVGEYVYKTGSANLKRVQALTGAKNHTIVLNDADLEDTVTNVISAAFGSAGERCMACAVVTVEEGIADEFLEALRTAAQNVKIGNGLDDGVFLGPVIREENQKRTIAYIEKGIEEGAKLTVDGRETGLSEGHFVGPTILEDVTTDMTIWKDEIFAPVLSVIRVKNLQEAVRVANQSEFANGACIFTNNAKAIRYFREKIDAGMLGVNLGVPAPMAFFPFSGWKSSFYGTLHANGKDSVDFYTHKKVVTARYSLKGYEE

SEQ ID NO: 10769 - protein, 165 aa, Aegilops speltoides
VMASSATTVTPFHGLKSTAGLPVSRRSSGSLGRVSNGGRIRCMQVWPIEGIKKFETLSYLPPLSTEALLKQVDYLIRSKWVPCLEFSKVGFVFREHNSSPGYYDGRYWTMWKLPMFGCTDATQVLSEVEEVKKEYPDAYVRVIGFDNLRQVQCVSFIAFRPPGWE

SEQ ID NO: 10770 - protein, 239 aa, Eriobotrya japonica
MGGGRVQLKRIENKINRQVTFSKRRTGLLKKAHEISVLCDAQVAVVVFSNKGKLFEYATDSCMEQILERYERYSYAERQLVEPEFESQGNWTFEYCRLKAKVEVLQRNHRHYLGEDLDSLTLKEIQNLEQQLDTALKQIRLRKNQLMHESISELQRKRKAIQEENNLLAKKIKEKEKAAAQPQVQDWEQQNIGLDLLPQPLPCLNNGGTQQDEFLQVRRNQLDLTLEPLYSCHLGCFAA

SEQ ID NO: 10771 - protein, 431 aa, Burkholderia fungorum LB400
MLPVAVAGEGIEIIDSTGKRYIDASGGAAVSCLGHSNQRVIDAIKRQSQQLPYAHTSFFTTEPAEALADRLVASAPQGLEHVYFVSGGSEAIEAALKLARQYFVEKGEPRRRHFIARRQSYHGNTLGALAIGGNAWRREPFLPILIEAHHVSPCYAYREQRADETEEAFAQRLADELERKILELGADTVAAFIAETVVGATAGAVPPVREYFRKIRAVCDRYGVLLILDEIMSGMGRTGYLYACEEDGVAPDILTIAKGLGAGYQPIGATLVSERIYQAIVGGSGFFQHGHTYIGHATACAAALEVQRVIEEDNLLPNVLARGEQLRVRLREHYAQHPHIGDVRGRGLFVGVELVRDRAGKTPFDAALKLHAAIRREAFARGLMVYPMGGTVDGKIGDHVLLAPPFICTARDIDEIVSRLTDAIDGALAAV

SEQ ID NO: 10772 - protein, 337 aa, Aspergillus nidulans FGSC A4
MSISSTSPPYPLHPSVKDLLDPEYVAFYNAHVIDKQQVHLQPVETSRTSGILIPGGGPLVDVGKTVDITIKRRATEGPEILLRAFTPIGEAPEGGWPVMLYFHGGGWVLGNIDTENVVCTNLCSRGGCVVVTVDYRLAPENPWPAAVHDCWESFLWLLSDGPANLNINISKIATGGSSAGGNLAAIITHKALTLSPPVRFLAQLLSVPVMDNTATVSNNESYRRYEFVPALPAAKMLWYRNHYLPNEKDWSHPEASPLFYTGDWSALPRALIMVGELDVLRSEGEQYAEKLKQAEVEVDLQVMKGMPHPFLAMDGVLKEGKRSITLMCDLLKEVFSS

SEQ ID NO: 10773 - protein, 497 aa, Pseudomonas aeruginosa UCBPP-PA14
MIDGLLRSLGLDPNAFRDGELAVHTPIDGSRLAAVPLEGRAAVAAKVERAEQAFRAWRQVPAPRRGELVRLFGEELRRHKAELGELVSWEAGKITQEGLGEVQEMIDICDFAVGLSRQLYGLTIASERPGHHMRETWHPLGVVGVISAFNFPVAVWSWNTALALVCGNSVVWKPSEKTPLTALACQALFERAARAFGGDAPAHLSQLLIGDREAGEALVDDRRVALVSATGSTRMGREVAPRVAARFARCILELGGNNAMILAPSADLDLAVRGILFGAVGTAGQRCTTLRRLIAHESVKDEIVERLKAAYSRVRIGHPLEGNLVGPLIDERSYLAMQDALARAREEGGRVFGGERQLQERYPDAYYVSPAIVEMPGQTEVVRTETFAPILYVVGYRDFDEALRLNNEVPQGLSSCIFTTDLREAELFQGAAGSDCGIANVNIGTSGAEIGGAFGGEKETGGGRESGSDAWKAYMRRQTNTVNYSRELPLAQGITFD

SEQ ID NO: 10774 - protein, 144 aa, Clostridium perfringens str. 13
MLDQKTIDIIKSTVPVLKSNGLEITKTFYKNMFEQNPEVKPLFNMNKQESEEQPKALAMAILAVAQNIDNLEAIKPVVNRIGVIHCNAKVQPEHYPIVGKHLLGAIKEVLGDGATEDIINAWAKTYGVIAEVFINNEKEMYASR

SEQ ID NO: 10775 - protein, 318 aa, Ralstonia eutropha JMP134
MAIDPQLLAYYRRLAEQYGALPVPVDARARRERFAEVAASSVVPDPAGTTWEDLTLALEGRSLTARLFRPVADAPSRLIVYFHGGGWVVGSHETHHTVAALLAADTGCAVASVDYRLAPEYAFPAPCDDAVDAVRWFAVQRASLGFDTGFLAVAGDSAGGHLAALAAQQVNTEARQQVVVAQLLVYPVTAPVLSSESYRAFADGPGLTRDEMAWFWTQFIGAESLARGAQHEDLRIHLMAQAPKVQPPATAIVVAANDVLRDDGLAYADFLVRHDATVVTIEASGMTHGFARLQPDAPRAREWMQRAAQAFASLFDDV

SEQ ID NO: 10776 - protein, 320 aa, Vibrio vulnificus CMCP6
MIKKIGVLTSGGDAPGMNAAIRGVVRTALGAGLEVYGIYDGYLGLYEGRIKQLDRSSVSDVINRGGTFLGSARFPEFKEVAVREKAIENLKAHGIDALVVIGGDGSYMGAKKLTEMGYPCIGLPGTIDNDIAGTDYTIGYLTALNTVIESIDRLRDTSSSHQRISIVEIMGRHCGDLTLMSAIAGGCEYIITPETGLDKEKLIGNIQDGISKGKKHAIIALTELMMDANELAKEIEAGTGRETRATVLGHIQRGGRPTAFDRVLASRMGNYAVHLLMEGHGGRCVGIVKEQLVHHDIIDAIENMKRPVRNDLFKVAEELF

SEQ ID NO: 10777 - protein, 339 aa, Arabidopsis thaliana
MGEAVEVMFGNGFPEIHKATSPTQTLHSNQQDCHWYEETIDDDLKWSFALNSVLHQGTSEYQNIALLDTKRFGKVLVIDGKMQSAERDEFIYHECLIHPALLFHPNPKTVFIMGGGEGSAAREILKHTTIEKVVMCDIDQEVVDFCRRFLTVNSDAFCNKKLELVIKDAKAELEKREEKFDIIVGDLADPVEGGPCYQLYTKSFYQNILKPKLSPNGIFVTQAGPAGIFTHKEVFTSIYNTMKQVFKYVKAYTAHVPSFADTWGWVMASDHEFDVEVDEMDRRIEERVNGELMYLNAPSFVSAATLNKTISLALEKETEVYSEENARFIHGHGVAYRHI

SEQ ID NO: 10778 - protein, 252 aa, Triticum aestivum
  misc_feature (241)..(241): Xaa can be any naturally occurring amino acid
MMGYQKGVDIEAGTSGGTGTAAPTRGLYPGMTESPELRWALIRKIYVILSLQLLLTAVVAAVVVKVRAIPHFFVSSSAGLGLYIFLIIFPFIVLCPLYFYRQKHPVNLLLLGVFTVAISFAVGMTCAFTSGKVILEAAILTTVVVFSLTAYTFWAAKRGQDFSFLGPFLFASLIMLLVFGFIQILFPMGKLSHMIYGALAALIFSGYIVYDTDNIIKRYTYDEYVWAAVSLYLDVINLFLXALLTLFRAGDS

SEQ ID NO: 10779 - protein, 322 aa, Staphylococcus aureus subsp. aureus MRSA252
MKKIAVLTSGGDSPGMNAAVRAVVRTAIYNEIEVYGVYHGYQGLLNDDIHKLELGSVGDTIQRGGTFLYSARCPEFKEQEVRKVAIENLRKRGIEGLVVIGGDGSYRGAQRISEECKEIQTIGIPGTIDNDINGTDFTIGFDTALNTIIGLVDKIRDTASSHARTFIIEAMGRDCGDLALWAGLSVGAETIVVPEVKTDIKEIADKIEQGIKRGKKHSIVLVAEGCMTAQDCQKELSQFINVDNRVSVLGHVQRGGSPTGADRVLASRLGGYAVDLLMQGETAKGVGIKNNKIVATSFDEIFDGKDHKFDYSLYELANKLSI

SEQ ID NO: 10780 - protein, 549 aa, Triticum aestivum
MAAAATRRAASSLASRCLLARPAASPAAVPSALRRADGARGLLPGLLQRFGTAAAAEEPISPSVQVGETQLLINGKFVDAASGKTFPTVDPRTGEVIARVAEGDAEDVDRAVVAARKAFDEGPWPRMTAYERSRILLRFADLIEKHNDDIAALETWDNGKPYEQAAHIEVPMLARLMRYYAGWTDKIHGLIVPADGPHHVQVLHEPIGVVGQIIPWNFPLLMYGWKVGPALACGNTIVLKTAEQTPLSALYVSKLLHEAGLPEGVLNIVSGFGPTAGAALASHMDVDKIAFTGSTDTGKVILELSARSNLKPVTLELGGKSPFIVMDDADIDQAVELAHFALFFNQGQCCCAGSRTFVHERVYDEFVEKSKARALKRVVGDPFRKGVEQGPQIDDEQFKKILRYIKSGVDSGATLVTGGDKLGDKGYYIQPTIFSDVQDGMKIAQEEIFGPVQSIFKFNDLNEVIKRANASQYGLAAGVFTNNLDTANTLTRALRAGTVWVNCFDIFDAAIPFGGYKMSGIGREKGIDSLKNYLQVKAVVTALKNPAWL

SEQ ID NO: 10781 - protein, 339 aa, Arabidopsis thaliana
MGEAVEVMFGNGFPEIHKATSPTQTLHSNQQDCHWYEETIDDDLKWSFALNSVLHQGTSEYQDIALLDTKRFGKVLVIDGKMQSAERDEFIYHECLIHPALLFHPNPKTVFIMGGGEGSAAREILKHTTIEKVVMCDIDQEVVDFCRRFLTVNSDAFCNKKLELVIKDAKAELEKREEKFDIIVGDLADPVEGGPCYQLYTKSFYQNILKPKLSPNGIFVTQAGPAGIFTHKEVFTSIYSTMKQVFKYVKAYTAHVPSFADTWGWVMASDHEFDVEVDEMDRRIEERVNGELMYLNAPSFVSAATLNKTISLALEKETEVYSEENARFIHGHGVAYRHI

SEQ ID NO: 10782 - protein, 409 aa, Staphylococcus aureus subsp. aureus MRSA252
MSLRDEALEMHKRNQGKLEVKPNVKVTNKEELSLAYSPGVAEPCKDIYEDKRKVYDYTIKGNTVAVITDGTAVLGLGNIGPEASIPVMEGKAVLFKSFAGINGVPIALNTTDTEEIIKTVKLLEPNYGGINLEDISAPRCFEIEERLKKETNIPVFHDDQHGTAIVTMAGLVNALRVVNKDIAKIKVVLNGAGAAGIAIVKLLYAYGVRNMVMCDSRGAIFEGRSYGMNPTKDVVAKWTNKDKIEGSLEEVVKDADVFIGVSVANALSQDMVKSMADNPIIFAMANPNPEIIPDDAKAAGARVVGTGRSDYPNQINNVLAFPGIFRGALEVEATHINEEMKKAAVEAIADLIDSSELNEDYCIPGPFDKRVAPSVARNVAKAAMESGVARIEVDPQDVYDKTMKLTDLQ

SEQ ID NO: 10783 - protein, 488 aa, Aspergillus nidulans FGSC A4
MAQVEVPSTNGSGKSVETRLFINGEFQPSSDGKTFSLIDPFTQNSVAEVSQATEEDTNNAVAAAKAAFPAWRDRSPADRGACLHKLAALIRENNEEFARLEALSTGRPVSRYFDATVSADTFSYFAEAGWTVQGTSSLNTPGHLNMTVKQPYGVVACIIPWNVPMAFFAFKVAPALAAGNTVVLKSSEKAPLTSALAATLIAEAGFPPGVINILSGFGTPAGSTLASHMDVRCLSFTGSSFTGQRIQAAAAASNMKIVHMELGGKSPALIFEDADLENAAQATQFSIQCLSGQTCMANSRIYVQESVADEFLALFKEKFGSAVLGNPLESGTTHGPQVDGLQYERVKSYITIGEQDGKLSMGGDAGNGYFVKPTVFEGVPEDSRIVKEEVFGPVVVINTFKTEEEAIKKANASEFGLYASVFTKDLDRAVRTSKLLEAGTVGVNTTSPNVAKDMPFGGYKMSGVGREGFMHSLDNFLETKTILIKMSS

SEQ ID NO: 10784 - protein, 339 aa, Arabidopsis thaliana
MGEAVEVMFGNGFPEILKATSPTQTLHSNQQDCHWYEETIDDDLKWSFALNSVLHQGTSEYQDIALLDTKRFGKVLVIDGKMQSAERDEFIYHECLIHPALLFHPNPKTVFIMGGGEGSAAREILKHTTIEKVVMCDIDQEVVDFCRRFLTVNSDAFCNKKLELVIKDAKAELEKREEKFDIIVGDLADPVEGGPCYQLYTKSFYQNILKPKLSPNGIFVTQAGPAGIFTHKEVFTSIYNTMKQVFKYVKAYTAHVPSLADTWGWVMASDHEFDVEVDEMDRRIEERVNGELMYLNAPSFVSAATLNKTISLALEKETEVYSEENARFIHGHGVAYRHI

SEQ ID NO: 10785 - protein, 112 aa, Bartonella clarridgeiae
ANETCLKMLQEIGTVQKIPEFIARAKDKNDRFRLMGFGHRVYKNYDPRAKIMQQTCHEVLKELNIQDDPLLDIAMELEKIALNDEYFIEKKLYPNVDFYSGITLKALGFPTE

SEQ ID NO: 10786 - protein, 435 aa, Burkholderia cepacia R18194
MSRQQQAQELQQQWESDPRWKGIKRSYTAEDVVRLRGSIPIEHTLAKRGAEKLWSLVNNEPFVNALGALTGNQAMQQVKAGLKAIYLSGWQVAGDANVAGEMYPDQSLYPANSVPLVVKRINNTLTRADQIQWSEGKNPGDEGYVDFFAPIVADAEAGFGGVLNAFELMKAMIESGASGVHFEDQLASVKKCGHMGGKVLVPTREAVAKLSAARLAADVMGTSTLLVARTDAEAADLITSDVDDNDKPFLTGERTVEGFFRTKPGIEQAISRGLAYAPYADLVWCETGKPDLEYAKKFAEAIHKQFPGKMLSYNCSPSFNWKKNLDDATIAKFQKELGAMGYKFQFITLAGFHALNYSMFNLAHGYARTQMSAFVELQQAEFAAADKGFTAVKHQREVGTGYFDAVTQTVEREASTTALHGSTEDEQFFDGKKVA

SEQ ID NO: 10787 - protein, 284 aa, Streptococcus agalactiae 2603V/R
MTDTMILNDNHKIPTLGLGTWMIDNDRVAQVVKDAIELGYRHIDTAQAYNNEKGVGVGIKESGITRESLFVTTKIAAEHKDYESATKSIDQSLEALGLDYIDLMIIHSPQPWKEWRETDKHFDQGNLEAWRALEDAQKSGKMKSIGVSNFLEKDLENILKNGHVKPAVNQILAHIGNTPFDLIDYCQSKGIQVEAYSPIAHGQALKSDGIQKMAEKYGVSVAQLCIQYLLQLNLIVLPKASSKEHLQSNLDFDFVISDEDMSILKSLMFDDYGEFSNFPVFSGK

SEQ ID NO: 10788 - protein, 257 aa, Triticum aestivum
  misc_feature (22)..(22): Xaa can be any naturally occurring amino acid
  misc_feature (174)..(174): Xaa can be any naturally occurring amino acid
  misc_feature (233)..(233): Xaa can be any naturally occurring amino acid
MSTTRVKRRVGKYELGRIRFAXNTETGDPVAIKILDKEKLLKHKMVEQIKREIATMKLIKHPNVVRIHEVMGSKTKIYIVLEYVTGGELFDTIVNHGRMREDEARRYFQQLINAVDYCHSRGVYHRDLKPENLLLDSCGNLKVSDFGLSALSQQLKDDGLLHTTCGTPIMLPRXNYVAPDVLEDQGYDGAMADLWSCGVILFVLLAGYLPFEDSNLMALYSSISRAAATFVTXSSFLRPRIQSKILDSNPIGSIAVQ

SEQ ID NO: 10789 - protein, 164 aa, Zea mays
KCGHMAGKVLVAVSEHVNRLVAARLQFDVMGVETVLVARTDAVAATLIQTNVDARDHQFIVGATNPGLRGQSLAAVLSAGMSAGKSGRELQGIEDEWLAAAQLKTFSECVRDAIAGLGVAAQEKQRRLQEWDRATGGYDRCVSNDQARDIAASLGVTSVFWDWD

SEQ ID NO: 10790 - protein, 231 aa, Zea mays
ADHDDDERDQPALHVLPDGDPERWHAQVFRSVDAGSVKRFPRPWERAEMARRHLVGDKNLAVERSIHAAYVAAIRSAERFVYVENQYFIGGSYAWPSYRNGGACNLVPMEIALKVASKVRAGEPFAAYVVLPMWPEGNPGSGPAQEILFWQNQTMEMMYSVVAAALEGKGGHPQEHLNFYCLGNREPAEDAGDGNKWAPADPLDDATTSSAAVRDCHCSGPRRSSFIQSFH

SEQ ID NO: 10791 - protein, 278 aa, Zea mays
PRVRYFWDVLLDADLESDILGWQYISGSLPDGHELSRLDNPEVQCQKYDPDGEYVRTWIPELARMPTEWIHSPWAAPNSILQVAGVELGFNYPKPIVELHMARECLDDAISTMWQLDTAAKLAELDGEVVDDNLNNIRNFDIPKVVLNKKLSPSTSSMEHRVLSTNGKDEKSQPTEVKALYKQIIRDDMMNDSNMDDTCSTANLKVTRKRSSSDSAFNVPSCSSSLVMESRIHHNEPSSVLYSGYFQKTADRDGTSKVEDNDSEDSGTSISRPSKKAA

SEQ ID NO: 10792 - protein, 460 aa, Yarrowia lipolytica
MCVDSCVQRSSLPHLSRPPGNLHKIINSDIYIYIKPHAPTPLLVAFAPTPHPSTTTSPFGQGLHQAHRQRVASLPTYGKTTTFNLPDNRPIKTVHCPSCEHVCRPQTQDAEAQKLQEAVTQRRRRSGAPGNSFPSAITALHPRQTHAPRERPSARQPDKPNGNRWELGVEFKIDIRAQDLRTIQELGAGNGGSVSRVEHIPTGAVMAKKVIHIGGKEAVRRQILRELHIMHECDSPYIVSFYGAFINESSGDVVMCMEFMDCGHLDRIYKKAGPLTEEIVGHITVAVVEGLTYLYNEHRIVHRDVKPSNILVNSHGQIKLCDFGVSGELINSIADTFVGTSTYMSPERIQGGNYTVKSDVWSLGISLLELLLGKFPFDMANGAVGPMGILDLLQRIVNEPPPTLPAEDTRFSPVCRRFVDRCLVKEPERPSPQQLHPTMPFIITSRAKQVDMKAWAMSVQ

SEQ ID NO: 10793 - protein, 271 aa, Pseudanabaena sp. PCC 7409
MNEETGIPDDNLLTIEQAIANLQSEDLGLRVYAAWWLGRFRVNVPEAIDLLIAALADEADRTEAGGYPLRRNAARALGKLGDRRAVPALITSLECDDFYVREAVAQSLEMLGDNSCVPYLIELIKNPNPEASADTEPEHPYDAFLEALGTLGAVKAIPHILPFLDHPIPKVQYAAARAMYQLSEPMVADQYGDRLVAALANDDLQLRRTVLSDLGAIGYLSAAEAIGNTMAENSLKLISLKGLLEKQIVLATPPDLTDGAIRVMALMDDLL

SEQ ID NO: 10794 - protein, 480 aa, Gibberella zeae PH-1
MTRNKFSSLRDQLVQGKLLLPGDEGYDQSLERWSRTCVKPAAAVAQPRTAEEVSAVVKFATSNGIKFNVKGGGHSSSQTSSSPSPEGMVLDLSLMRDVSVDADAQTITYAGGCLWKDVDDALWAKGLATVGGTVSHTGVGGLTLHGGYGVLSGLHGLAIDNMIACQVVLADGSIVTASASENPDLFWALRGAGSSFGVVTQFTSKAHPQGDIWGGMVLFSPDKLPAIIDFTNTWGATNDGRQILLVAFGHAPPGPDPNAPRPPVVVVRMAQVGDNPSEEGPKYFAPILEMEALMQEIGPMPYPVINQVADGQVMHGSRYLFGGSNFTLPMKLSTAETIRNRFHEFTERTPDATESVVLIECIPNQKIREIPVESTAFNSRGKYFIIGFMYKYEDESLDTEIRQFNRTFQTEVRKLGYNDETLADGIGNYLNYANTGNISAEEAFGSHSKRLVTLKKKYDPENVFDKLWKLVGKVEDNWIA

SEQ ID NO: 10795 - protein, 331 aa, Thinopyrum intermedium
MKTFLVFCLLAVAATSAIAEMESNIIISFLKPWLQQPLPPQQTLPQQQQRPIQQQPQPYPQIPFPPQQPPFSQQQQPSFSQQQQPSFSQQQQPPFSQQQQPSFSQQQQPPFSQQQQSPFSQQQPPVSQQQPPFLQQQQPVLPQQPPFLQQQQLVLPQQQIPFVHPSVLQQLNPCKVFLQQLCSPVAMPQRLARSQMLQQSSCHVIQQQCCQQLPQIPQQSRYEAIRAIIYSIILQEQQQVQGSIQPQQQQPQQLGQCVSQPQQQSQQQLGQQPQQQQLAQVTFLQPHQIAQLEVMTSIALRTLPTMCSVNVPLYRTTTSVPFGVGTGVGAY

SEQ ID NO: 10796 - protein, 351 aa, Clostridium beijerinckii
MKGFAMLGINKLGWIEKERPVAGSYDAIVRPLAVSPCTSDIHTVFEGALGDRKNMILGHEAVGEVVEVGSEVKDFKPGDRVIVPCTTPDWRSLEVQAGFQQHSNGMLAGWKFSNFKDGVFGEYFHVNDADMNLAILPKDMPLENAVMITDMMTTGFHGAELADIEMGSSVVVIGIGAVGLMGIAGAKLRGAGRIIGVGSRPICVEAAKFYGATDILNYKNGHIEDQVMKLTNGKGVDRVIMAGGGSETLSQAVKMVKPGGIISNINYHGSGDALLIPRVEWGCGMAHKTIKGGLCPGGRLRAERLRDMVVYNRVDLSKLVTHVYHGFDHIEEALLLMKDKPKDLIKAVVIL

SEQ ID NO: 10797 - protein, 126 aa, Zea mays
YNHVLQVDYACTPEEVQQHFQACGTVNRVTILTDKFGQPKGFAYVEFLEQEGVQEALNLNESELHGRQIKVAPKRTNVPGMKQRPPRGYNPYHGYPYRSYGAPYFPPYGYGRAPRFRRPMRYRPYF

SEQ ID NO: 10798 - protein, 338 aa, Thinopyrum intermedium
MESNIIISFLKPWLQQPLPPQQTLPQQQQRPIQQQPQPYPQIPFPPQQPPFSQQQQPSFSRQQQPSFSQQQQPSFSQQQQPPFSQQQQPSFSQQQQPAFSQQQQPPFSQQQPPVSQQQQPVLPQQPPFSQQQQPVLPQQPPFSQQQQPVLPQQQIPFVHPSVLQQLNPCKVFLQQLCSPVAMMPQRLDRSQMLQQSSCHVMQQQCCQQLPQIPEQSRYEAIRAIIYSIILQEQQQGQGSIESQQQQPQQSGQGVSQPQQQSQLGQCAFQQPQLQQLGQQPQQQQAAHGTFLQPHQIAQLEVMTSIALRTLPTMCSVNVPLYGTTTSVPFGVGTGVSAY

SEQ ID NO: 10799 - protein, 293 aa, Hordeum vulgare subsp. spontaneum
MSPTLSLKLKKSSHTPQSSVSSSTMLRLFKKEAACQSPSTLPVAMDMGLEVSSSSPSSSSVSSSPEHAARRASPAKRPAGRTKFRETRHPVYRGVRRRGNTERWVCEVRVPGKRGARLWLGTYATAEVAARANDAAMLALGGRSAACLNFADSAWLLAVPSALSDLADVRRAAVEAVADFQRREAADGSLAIAVPKEASSGAPSLSPSSGSDSAGSTGTSEPSANGVFEGPVVMDSEMFRLDLFPEMDLGSYYMSLAEALLMDPPPTATIIHAYEDNGDGGADVRLWSYSVDM

SEQ ID NO: 10800 - protein, 191 aa, Paracoccidioides brasiliensis
MAEIRRKLVIVGDGACGKTCLLIVFSKGTFPEVYVPTVFENYVADVEVDGKHVELALWDTAGQEDYDRLRPLSYPDSHVILICFAIDSPDSLDNVQEKWISEVLHFCQGHPIILVGCKKDLRDDPRTIEELRKTSQKPVTTEQGEEVRKKIGAYKYLECSARTNDGVREVFESATRAALLAKKEKKKCKIL

SEQ ID NO: 10801 - protein, 177 aa, Lemna gibba
MASSMMASTAAVARAGPAQSSMVAPFNACRSSVAFPATRKANNNLSTLPGNGGRVSCMQVWPPEGLKKFETLSYLPPLSVEDLAKEVDYLLRNDWVPCIEFSKEGFVYRENHASPGYYDGRYWTMWKLPMFGCTDASQVIAEVEEAKKAYPEYFVRIIGFDNKRQVQCISFIAYKPT

SEQ ID NO: 10802 - protein, 110 aa, Triticum aestivum
MDSQFGAMERGGSRQRRSPVSARPNTAKRHLQQQRANAADKKVVIPNYFGVEAFFVLACLTVSLLILPLVLPPLPPPPSLLLFVPVCLLILLMVLAFMPTDVRSMATSYL

SEQ ID NO: 10803 - protein, 379 aa, Bdellovibrio bacteriovorus HD100
MAEVNIYEGALDKGLEGVVACTTKVSFIVGDSLNFRGYTIDDLAANSTFEEVTYLLWNDKLPNAQELAAFSTQLRNEMALSPDFIKVLKAIPTNVHPMGWLRTAVSLMAHWDSDANDNGAEANLRKSVRLTAKMGTLLCAFDAIRKGKEPVAPKADKSMAWNMMYMLGGGAEPKAEHVKVMDTCLILHADHELNCSAFATRVTASSLSDLHSAIVSAIGALKGPLHGGANEQVILMLQKIGTMEKAQQFVKDALAAKEKVMGIGHRVYKNGDPRARILRGMSDKLTKDAGIHHMYEMSTLIDDTMFNEKGLMPNVDFYSATVYFSMGIPTDLFTPIFAASRISGWCAHAFEQYANNRIYRPRGKWAGKEGLKWTPANQR

SEQ ID NO: 10804 - protein, 421 aa, Spinacia oleracea
MTDRLAMASFTTTTAAAASRLLPSSSSSISRLSLSSSSSSSSSLKCLRSSPLVSHLFLRQRGGSAYVTKTRFSTKCYASDPAQLKNAREDIKELLQSKFCHPIMVRLGWHDAGTYNKDIKEWPQRGGANGSLSFDVELKHGANAGLVNALKLLQPIKDKYSGVTYADLFQLASATAIEEAGGPTIPMKYGRVDATGPEQCPEEGRLPDAGPPSPAQHLRDVFYRMGLDDKDIVALSGAHTLGRSRPERSGWGKPETKYTKDGPGAPGGQSWTAEWLKFDNSYFKDIKEKRDADLLVLPTDAALFEDPSFKVYAEKYAADQEAFFKDYAEAHAKLSNQGAKFDPAEGITLNGTPAGAAPEKFVAAKYSSNKRSELSDSMKEKIRAEYEGFGGSPNKPLPTNYFLNIMIVIGVLAVLSYLAGN

SEQ ID NO: 10805 - protein, 201 aa, Zea mays
  misc_feature (152)..(152): Xaa can be any naturally occurring amino acid
  misc_feature (161)..(161): Xaa can be any naturally occurring amino acid
  misc_feature (170)..(170): Xaa can be any naturally occurring amino acid
  misc_feature (173)..(173): Xaa can be any naturally occurring amino acid
  misc_feature (182)..(182): Xaa can be any naturally occurring amino acid
  misc_feature (185)..(185): Xaa can be any naturally occurring amino acid
  misc_feature (196)..(196): Xaa can be any naturally occurring amino acid
MKPPSLVHCFKLLVLLALARLTMHVPDEDMLSPLGALRLDGHFSFHDVSAMARDFGNQCSFLPAAVLHPGSVSDIAATVRHVFSLGEGSPLTVAARGHGHSLMGQSQAAQGIVVRMESLRGARLQVHDGFVDAPGGELWINVLRETLKHGLXAPQSWTDYXHLTVGGTCXNAXVSGQAFRHXPQXRGDVVTCSPEXNSDLF

SEQ ID NO: 10806 - protein, 203 aa, Gibberella zeae PH-1
MAQAGGSYNNPLKKFKLVFLGEQSVGKTSLITRFMYDSFDNMYQATIGIDFLSKDRTVRLQLWDTAGQERFRSLIPSYIRDSSVAVVVYDISNAKSFQNTKKWIDDVRAERGNDVIIVLVGNKTDLNEKREVTTQQGEEEAKKNNLMFVETSAKLGHNVKNLFKRIAQALPGMEGSDAAAQASNQMIDVKTNNTQQSQEGCAC

SEQ ID NO: 10807 - protein, 339 aa, Arabidopsis thaliana
MGEAVEVMFGNGFPEILKATSPTQTLHSNQQDCHWYEETIDDDLKWSFALNSVLHQGTSEYQDIALLDTKRFGKVLVIDGKMQSAERDEFIYHECLIHPALLFHPNPKTVFIMGGGEGSAAREILKHTTIEKVVMCDIDQEVVDFCRRFLTVNSDAFCNKKLELVIKDAKAELEKREEKFDIIVGDLADPVEGGPCYQLYTKSFYQNILKPKLSPNGIFVTQAGPAGIFTHKEVFTSIYNTMKQVFKYVKAYTAHVPSFADTWGWVMASDHEFDVEVDEMDRRIEERVNGELMYLNAPSFVSAATLNKTISLALEKETEVYSEENARFIHGHGVAYRHI

SEQ ID NO: 10808 - protein, 112 aa, Bartonella sp. sh6833ga
ANEACLKMLQEIGSVKRIPEFIARAKDKNDPFRLMGFGHRVYKNYDPRAKIMQKTCHEVLKELNIQDDPLLDIAIELEKIALNDEYFGEKKLYPNVDFYSGITLKALGFPTE

SEQ ID NO: 10809 - protein, 479 aa, Caulobacter crescentus CB15
MREYTKFYIDGAWVDPAAPNTLDVINPATEEVCGVISMGSEADVDKAVRAARKAFASFSQTSREERIDILERIIAEYQKRFEDMAKAITEEMGAPAWLAQRAQAAMGIGHVQTAAAVLKGYKFEEDRGTTRIVKEPIGVCAFITPWNWPVNQIACKVGPAIATGCTMVLKPSEIAPFSGYIWTEIMHAAGVPAGVFNLVNGDGPTVGAALSRHPEVDMVSFTGSTRAGIEVAKNAAPTVKRVHQELGGKSPNIILDDADFSRAVAGGVASVMMNSGQSCNAPTRMLVPGARMDEVIAIAKAAAESHTVGDPNGNHKMGPVVSETQWNKIQGLIQKGIDEGATLVTGGVGRPEGLDKGYYVKPTVFANVTNEMTIAKEEIFGPVVSILGYDTVDEAVTVGNDTEYGLAAYVSGGDQDEVRKVASRLRAGQVTLNGAGPDLMAPFGGYKMSGNGREWGDHAFGEFLETKAILGYSAKVAAE

SEQ ID NO: 10810 - protein, 339 aa, Arabis gemmifera
MGEAVEIMFGNGFPEIHKDTSPIQTLHSNQQDCHWYEETIDDDLKWSFALNSVLHQGTSEYQDIALLDTKRFGKVLVIDGKMQSAERDEFIYHECLIHPALLFHPNPKTVFIMGGGEGSAAREILKHTTIEKVVMCDIDQEVVDFCRRFLTVNSDAFCNKKLELVIKDAKAELEKREEKFDIIVGDLADPVEGGPCYQLYTKSFYQNILKPKLSPNGIFVTQAGPAGIFTHKEVFTSIYNTMKQVFKYVKAYTAHVPSFADTWGWVMASDHEFDVEVDEMDRRIEERVKGELMYLNAPSFVSAATLNKTISLALEKETEVYSEENARFIHGHGVAYRHI

SEQ ID NO: 10811 - protein, 418 aa, Mycobacterium bovis AF2122/97
MASGSGLCKTTSNFIWGQLLLLGEGIPDPGDIFNTGSSLFKQISDKMGLAIPGTNWIGQAAEAYLNQNIAQQLRAQVMGDLDKLTGNMISNQAKYVSDTRDVLRAMKKMIDGVYKVCKGLEKIPLLGHLWSWELAIPMSGIAMAVVGGALLYLTIMTLMNATNLRGILGRLIEMLTTLPKFPGLPGLPSLPDIIDGLWPPKLPDIPIPGLPDIPGLPDFKWPPTPGSPLFPDLPSFPGFPGFPSLPGFPGLPGFPEFPAIPGFPALPGLPSIPNLFPGLPGLGDLLPGVGDLGKLPTWTELAALPDFLGGFAGLPSLGFGNLLSFASLPTVGQVTATMGQLQQLVAAGGGPSQLASMGSQQAQLISSQAQQGGQQHATLVSDKKEDEEGAAAGVAEAERAPIDAGTAASQRGQEGTVL

SEQ ID NO: 10812 - protein, 484 aa, Bordetella bronchiseptica RB50
MENLGYPARLELYVAGQWRGVEGRRTQVVVNPSTQQPLGELPLASVEDIDDALAAADQAFGDWARTTAWERADILQRAAALIEARRDRLAVVLTLENGKPLADSHGELDRVVETILWCAEEGKRTYGRVLPARAQRLSQSSLKRPVGPVAAFVPWNFPAVLAARKLAAAMAAGCTVVLKPAEETPAICIELVRAFVDAGTPAGVVNLLYGVPAQVSERLIASPIIRKVSFTGSVAVGRLLASMAAGHLKPATMELGGHAPVVVFDDVDADRVAKMCVGFKYRNAGQVCLSPSRFYVHERIADRFAESFVRHAGLLRVGDGMEEGVQMGPLNNVRRLQAAERLVEQAVGAGASLALGGRRIGQRGYFYPPTVLEGVPDAADILAEEPFCPVAPIMRFGSMDEVIGRANHPSLGLAAYAFTNRMATSAEFAERIEAGWIGINNFVPALADAPIGGMKDSGLGYEGGPEGLDAYLHARFVSQLNVEV

SEQ ID NO: 10813 - protein, 361 aa, Zea mays
AHTPDAFAPRIPLAGGRLYQPGRCWEDVFDAISNARHLIYITGWSVYTEITLLRDGSRPRPGGEATLGELLKRKASEGVRVLMLVWDDRTSVESLGMKWGFMSTHDAETAEYFRGSGVHCVLCPRNPDAGSSAVMGAQIAYMITHHQKIVVVDHEMPAKRSDRRRILSFVGGLDLCDGRYDTQFHSLFRTLDTAHHKDFHQPNLAGASIDNGGPREPWHDIHSKIEGPAAWDVLYNFEQRWRKQGGGIDLLVNLKAMADLIIPPSPVMFPEDQDSWNVQLFRSIDGGACFGFPSTPEAAAQSGLVSGKNNVLDRSIHDAYIHAIRRAKHFIYIENQYFLGSSFAWKADGIKPEEIEALHLV

SEQ ID NO: 10814 - protein, 202 aa, Neurospora crassa
MSDSPQSNSKDVEQGAPSPGEEPQMNDPQDPHSSGLNQYEFEVKEQDRWLPIANVARIMKNALPENAKIAKEAKECMQECVSEFISFITSEASEKCQQEKRKTVNGEDILFAMTSLGFENYAEALKIYLSKYREQQNQTNRSENQQNRPSSQGYGAPQGQNQPGQGGFSSNDLGGQQESGDASGYNLYGAQTGHNGGGAEGY

SEQ ID NO: 10815 - protein, 321 aa, Thinopyrum intermedium
MESNIIISFLEPWLQQPLPPQQTLPQQQQRPIQQQPQPYPQIPFPPQQPPFSQQQQPPFSQQQQPPFSQQQQPSFSQQQQPPFSQQQQPPFSQQQPPVSQQQQPVLLQQPPFSQQQQPVLPQQPPFSQQQQPVLPQQQIPFVHPSVLQQLNPCKVFLQQLCSPVAMPQRLARSQMLQQSSCHVMQQQRCQQLLQIPEQSRYEAIRAIIYSIILQEQQQGQGSIESQQQQPQQSGQGVSQPQQQSQLGQCAFQQPQLQQLGQQPQQQLAAHGTFLQPHQIAQLEVMTSIALRTLPTMCSVNVPLYGTTTSVPFRVGTGVSAY

SEQ ID NO: 10816 - protein, 125 aa, Triticum aestivum
  misc_feature (13)..(13): Xaa can be any naturally occurring amino acid
  misc_feature (20)..(20): Xaa can be any naturally occurring amino acid
  misc_feature (43)..(43): Xaa can be any naturally occurring amino acid
  misc_feature (52)..(52): Xaa can be any naturally occurring amino acid
YFHLPIREASRTXKIGLSIXKKKCRQYGIPRWPHRKLKSLDSXIHDLEYVIXDETERDGVKQEDHMQDEKENQDAIEALAKRKRMLETEKATIQQKPTLDLMAETKQFRQYVFKRKYRAKTLVSE

SEQ ID NO: 10817 - protein, 165 aa, Triticum timopheevii subsp. armeniacum
VMASSATTVAPFQGLKSTAGLPVSRRSSGSLGRVSNGGRIRCMQVWPIEGIKKFETLSYLPPLSTEALLKQVDYLIRSKWVPCLEFSKVGFVFREHNSSPGYYDGRYWTMWKLPMFGCTDATQVLSEVEEVKKEYPDAYVRVIGFDNLRQVQCVSFIAFRPPGCE

SEQ ID NO: 10818 - protein, 174 aa, Gloeobacter violaceus PCC 7421
MGKGVTLWFTGLSGAGKSTISGIVAKKLQEIGRNVEVLDGDEVRLNLSAGLSFSKADRDTNVRRIGYVCRLLSRNGVIAISAAISPYRNTREELRANIIDFLEIFVDCPLDVCIERDVKGLYAKALKGEIPAFTGVSDPYEAPANPDLTILTNTESKDESANRVVQLLYERGYL

SEQ ID NO: 10819 - protein, 513 aa, Glycine max
MHTLLRSTLRTKTASSLAYAVVSRSAHENLLQAPLLSRSNSTEASLAKDNSSNDVKNGQGYKGHSMLAPFTAGWQSSDLHPLIIEKSEGSYVYDINGKKYLDALAGLWATSLGGSEPRLVDAAVAQLKKLPFYHSFWNRTTLPSLDLAKELLEMFTARKMGKAFFVNSGSEANDTQVKLVWYYNNALGRPDKKKFIARAKSYHGSTLIAASLSGLPALHQKFDLPAPFVLHTDCPHYWRYHLPGETEEEFSTRLANNLEQLILKEGPETIAAFIAEPVMGAGGVIPPPSTYFEKVQAVVKKYDILFIADEVICAFGRLGTMFGCDKYNIKPDLVSLAKALSSAYLPIGAVLVSPEISEVIHDQSNKLGSFSHGFTYSGHPAACAVAIEALKIYKERNIVDQVNKIAPRFQDGIKAFSDSPIIGEIRGTGLILGTEFTDNKSPNDPFPPEWGIGAYFGAQCEKHGMLVRVAGDNIMMSPPYIISPGEVEELISIYGKALKETEKKVQELKSQRK

SEQ ID NO: 10820 - protein, 165 aa, Triticum aestivum
VMASSATTVAPFQGLKSTAGLPVSRRSSGSLGRVSNGGRIRCMQVWPIEGIKKFETLSYLPPLSTEALLKQVDYLIRSKWVPCLEFSKVGFVFREHNSSPGYYDGRYWTMWKLPMFGCTDATQVLNEVEEVKKEYPDAYVRVIGFDNLRQVQCVSFIAFRPPGCE

SEQ ID NO: 10821 - protein, 112 aa, Triticum aestivum
  misc_feature (91)..(91): Xaa can be any naturally occurring amino acid
  misc_feature (102)..(102): Xaa can be any naturally occurring amino acid
MAPTVMASSATSVAPFQGLKSTAGLPVSRRSNGASLGSVSNGGRIRCMQVWPIEGIKKFETLSYLPPLSTEALLKQVDYLIRSKWVPCLEXFNKVGFIFREXHNASPGYRWG

SEQ ID NO: 10822 - protein, 335 aa, Prochlorococcus marinus subsp. marinus str. CCMP1375
MTSLLDQLSSMTVVVADTGDLEAIRTFKPQDATTNPSLILAAAQIPAYQNLIDKSLQASRQRVGSFASAKEVVDEALDEVCVTFGKEILKIIPGRVSTEVDARLSFNTQATINKARKIIDLYKKVDISKERVLIKVASTWEGIKAAEVLESEGIHCNLTLLFGFSQAVACAEAGVTLISPFVGRILDWYKAETGKDSYAGEEDPGVVSVTKIFNYYKSNNYKTEVMGASFRNIDEILELAGCDLLTIAPKFLEQLENSDSKLTRKLDSLKPLPSETKIHLEEYDFRNMLKLDRMATEKLEEGIINFSKAIEQLEQLLSKRLSYIESGSNAELSIA

SEQ ID NO: 10823 - protein, 165 aa, Secale cereale
MMASSATTVAPFQGLKSTAGLPVSRRSSGSLGNVSNGGRIRCMQVWPIEGIKKFETLSYLPPLSTEALLKQVDYLIRSKWVPCLEFSKVGFVFREHNSSPGYYDGRYWTMWKLPMFGCTDATQVLNEVEEVKKEYPDAYVRVIGFDNLRQVQCVSFIAFRPPGCE

SEQ ID NO: 10824 - protein, 277 aa, Brassica napus
STHASGTPYTSCGTPNYVAPEVLNDGGYDGATADMWSCGVILYVLLAGYLPFDDSNLMNLYKKISSGEFNCPPWLSLGAMKLITRILDPNPMTRVTPQEVFEDEWFKKDYKPPVFEEKDDSNMDDVDAVFKDSEEHHVTEKKEEQPAAINAFEIISMSRGLNLENLFDPEQEFKRETRITLRGGANEIIDKIEEAAKPLGFDVQKKNYKMRLENVKAGRKGNLNVATEIFQVAPSLHMVQVSKSKGDTLEFHKFYKKLSNSLENVVWTNNEVKKAGK

SEQ ID NO: 10825 - protein, 163 aa, Zea mays
MDAVMFGLETPLMAALQHLLDVPDGDAGAGGDSDNKTGGGATRTYVRDARAMAATPADVKELPGAYAFVVDMPGLGTGDIRVQVEDERVLVVSGERRREEREDAKYLRMERRMGKFMRKFVLPDNADVDKVAAVCRDGVLTVTVEKLPPPEPKKPKTIEVKVA

SEQ ID NO: 10826 - protein, 59 aa, Brassica napus
EKFARSLRLSLREVKLSEGYYVMDPEQAVEMVDENTICVAAILGSTLNGEFEDVKLLNE

SEQ ID NO: 10827 - protein, 328 aa, Zea mays
HASGKIGPAIATGNTVIIKTAEQTPLSGLYASKLIVEAGFPPGVINVISGFGRTAGAAISSHMDIDKVAFTGSTLVGRMILQAAAKSNLKKVTLELGGKSPNIVFDDADIDNAISWSNFGIFFNHGQCCCAGSRLLVQEGIYDKFIERFKERAAKNQLGNPFAKDTFQGPQVSQLQFDRIMEYINHGKKEGATVALGGERHGTEGYFIQPTVFTDVTPNMKIAQEEIFGPVIAVTKFKDEAEAIKIGNSTSYGLAAAVHTKNVNTAIRVSNALKAGTVWINNYNMISYQAPFGGFKESGLGRELGSYALDNYTQVKTVHYRLGDALFG

SEQ ID NO: 10828 - protein, 255 aa, Brassica napus
GDIHGQYQDLLRLFEYGGYPPSANFLFLGDYVDRGKQSLETICLLLAYKIRYPSKIYLLRGNHEDAKINRIYGFYDECKRRFNVRLWKIFTDCFNCLPVAALIDDKILCMHGGLSPELDNLNQIREIQRPTEIPDSGLLCDLLWSDPDQKIEGWADSDRGISCTFGADKVAEFLDKNDLDLICRGHQVVEDGYEFFAKRRLVTIFSAPNYGGEFDNAGALLSVDESLVCSFEIMKPALASSSGHPLKKVPKMGKS

SEQ ID NO: 10829 - protein, 112 aa, Bartonella sp. sh7768ga
ANEACLKMLQEIGSVKKIPEFIARAKDKNDPFRLMGFGHRVYKNYDPRAKIMQKTCHEVLKELNRQDDPLLDIAIELEKIALNDEYFVEKKLYPNVDFYSGITLKALGFPTE

SEQ ID NO: 10830 - protein, 207 aa, Magnaporthe grisea 70-15
MTVMAGGALASRHLPASPRPAGRRAAPSSRRPHSTFVTWRESQLTPAAAEKGEETPLADYKGKVVLVVNTASKCGFTPQYAGLEALYKKITEKHPEDFTILGFPCNQFGGQEPGTDDDIQNFCQVNYGVTFPIMKKVDVNGDNADPLFKWLKEEMPGIMGLKRVKWNFEKFLIGRDGKVKGRWASTTKPESLEKDILKEIEAPKPSI

SEQ ID NO: 10831 - protein, 459 aa, Pseudomonas putida KT2440
MSTHSSTVQNDLAALIHPNTNLAQHREVGPLVIARGDGVRVFDEQGNAYIEAMSGLWSAALGFSEQRLVDAAVEQFKQLPYYHSFSHKTNAPAAALAAKLAALAPGDLNHVFFTNSGSEANDSVVKMVWYVNNALGRPAKKKFISRQQAYHGATVAAASLTGIPSMHRDFDLPAIPVHHLTCPNFYRFARPGESQEAFTVRLANELERYILAEGPETIAAFIGEPVIAAGGVIPPPTGYWAAIQAVCKRYDILVVIDEIITGFGRLGTMFGSQLYGIQPDIMVLSKQLTSSYQPLAAVVVSDAMNDVLVSQSQRLGAFAHGLTCTGHPVATAVALENIRIIEERDLVGHVQHLAPVFQRHLRAFEDHPLVGNVRGVGLMGGIELVADKATRQPFAQPGTLGGYVFKQAHKHGLIIRAIYDTIAFCPPLITTQDDIEAIFSAFERTLADATDWARSQHLL

SEQ ID NO: 10832 - protein, 474 aa, Pseudomonas putida KT2440
MQTKLLINGALVAGEGDHVDVYNPSLGRVLVQTHEASHAQVHAAVQSADAAFEAWSQTPPKDRAALLLTLADRIDAQAAVFARLEADNCGKPFTAVLQDELPAVSDVFRFFAGAVRCLQGSAAGEYIPGHTSMIRRDAVGVVASIAPWNYPLLMAAWKLGPALAGGNTVVLKPSEHTPMSTLKLGELLADIFPAGVVNIVHGRGATVGEPLTSHALVRMVSLTGSVRTGSRIIEGTADSVKRMHMELGGKAPVLIFDDADIDAAVEGIRAFGFYNAGQDCTAACRLYVQKAVYPEFVRKLGEAVSSIKCGLQDDPATEMGPLITQEHLQRVEGFVNRAREQPHIEVVTGGKRAAGAGFFFEPTVLAGTRQEDEVVCREIFGPVVTVSPFEDEAQVLAWANESDYGLASSVWTADVGRAHRLAARLQYGCTWVNTHFMLVSEMPHGGVKLSGYGKDLSMYGLEDYTLVRHVMFKH

SEQ ID NO: 10833 - protein, 407 aa, Moorella thermoacetica ATCC 39073
MSIQERALNLHREWQGKIETRPRVQVRNADDLTMAYTPGVAEPCKEIHKDPNLVDVYTRRWNLVAVVSDGSAVLGLGNIGARAAMPVMEGKSVLFKSFAGVDAFPICIDSQDVDEIVRTVQLLTPTFGGVNLEDIAAPRCFEIERRLKETTDIPIFHDDQHGTAVVVLSAIINACKITKRELSDLKVVINGAGAAGIACGKLLVDVGVSDVILCDSKGIICSKRDDLNAIKKEMLQITNKEDRCGTLADAMEGANCFIGLSVKDAVTPEMVRSMDKDSILFAMANPVPEILPDVARAAGAAVVGTGRSDFPNQVNNVLGFPGIFRGALDVKASDINDAMKIAAAHALADLVGDRLSADFVMPEAFDPRVAPAVAMAVARAAIESGVARDPKDPEWVKRHTEELIARQ

SEQ ID NO: 10834 - protein, 358 aa, Glycine max
MMSCKENEEDDTYLSALTLCFSRIFPAILNAAVDLNLFDIIDKAESSTLSASEIASLLLPNPHPQLANRLERILPVLASYSLLNCSIRTTEDGVRERLYALSPIGQYFASDDDGGSLGPLSSLFHRGYFHVLKDVKDAIMDPNNNDHFQNVHGMPPYQYMKTDEELNKLFNKALAQTGPPAMKMLLKLYKGFEQVSTLVDVGGGVGETLKQIIFEYPSIKGINFDLPQVVQDAPPYPGIEHVEGDMFESVPKGDAILLKLVCHNWLDEDCVKFLRNCHKALPQHGKVIVIDYIIPEVPDSSKISMQTCVADSLMFLVTSGKERTEKEFESLCRNSGFSRFHVACRDSPSVLSVIEFYK

SEQ ID NO: 10835 - protein, 69 aa, Brassica napus
MGGCVSTPKSCVGSKMRSKRRKSRKRRKLQRKRAAGSFDNLDHPPNNLPTPSFRASGEEAWFESNAAFE

SEQ ID NO: 10836 - protein, 459 aa, Oryza sativa
MESSNLGGGGGGGGGGGPPPFLIKTYEMVEDAATNHVVSCGPGGASFVVWNPLDFSRDLLPKYFKHNNFSSFIRQLNTYGFRKIDPERWEFANEDFIRGHTHLLKNIHRRKPVHSHSLQNQINGPLAESERRELEEEINRLKYEKSILVADLQRQNQQQYVINWQMQAMEGRLVAMEQRQKNIVASLCEMLQRRGGAVSSSLLESDHFSKKRRVPKMDLFVDDCAAGEEQKVFQFQGIGTDAPAMPPVLPVTNGEAFDRVELSLVSLEKLFQRANDACTAAEEMYSHGHGGTEPSTAICPEEMNTAPMETGIDLQLPASLHPSSPNTGNAHLHLSTELTESPGFVQSPELPMAEIREDIHVTRYPTQADVNSEIASSTDTSQDGTSETEASHGPTNDVFWERFLTETPRSCLDESERQESPKDDVKAELGCNGFHHREKVDQITEQMGHLASAEQTLHT

SEQ ID NO: 10837 - protein, 467 aa, Streptomyces sp. JP95
MLRDDLTGELVLPSDPGYRLAKQVQNTEYDAISPRAIAYCTSPDDVLACVRHAREAGIPAHVRGAGHSFNGWSTGTGLVIDLSRMNHAAADGPTVSIGAGIQSLDALDALKRHDRQIITGTFPTVGQGGFLSGGGLGWQTRKFGVASDRIVSARVVLADGRAVVASADEHPDLFWALRGGGGGNFGIVTAFELRPVDAPHLTAFETLWSFDDAADVLTAWQSWAAGESDDLGTSLVVLPGMFGPGGRPVVKVWGVHHGAAEELERALDALTDLAGVKPAHRETTATGPYADVMHEALCGSKTVQQCHRTGTGPEAVGHRHPYTRQAYRLTGRPVTRAEAESLLRAWEPDLDAEHYLLCIALGGAANRVGRTETAYVHRDARFLTGYQIATRDPEAVARGPVELDAWADRCAEALAPLATGSYINFPDSRTPPDWEADHYGENAARLRAVKRAYDPDGFFRHGRSIGS

SEQ ID NO: 10838 - protein, 386 aa, Triticum aestivum/Thinopyrum intermedium alien addition line
MESNIIISFLKPWLQQPLPPQQTLPQQLQQPVQQQPQQYPQIPFPPQQPPCSQQQQPPCSHEQQPSFSQQQQPSFSQQQQPPLLQQQQSPFLQQQQPSFPQQQPLVSQQQQPVLPQQPPFSQQQQTVLPQQPPFLQQQQPPFSQQQPPVSQQQQPVLPQQPPFSQQQQPVLPQRPPFSQQRQPVLPQQPPFSQQQQLVLLQQQIPFVHPSVLQQLNPCKVFLQQQCSPVAMPQRLARSQMLQQSSCHVMQQQCCQRLPQIPEQSRYEAIRAIIYSIILQEQQQGQGSVESQQQQPQQSGQGVSQPQQQSQLGQCAFQQPQLQQLGQQLQQQQAPHGTFLQPHQIAQLGVMTSIALRTLPTMCGVNVPLYGTTTSVPFGFGTGVGAY

SEQ ID NO: 10839 - protein, 165 aa, Hordeum vulgare subsp. vulgare
VMASSATTVAPFQGLKSTAGLPVSRRSSASLGSVSNGGRIRCMQVWPIEGIKKFETLSYLPPLTTEALLKQVDYLIRSKWVPCLEFSKVGFVFREHNSSPGYYDGRYWTMWKLPMFGCTDATQVLNEVEEVKKEYPDAYVRIIGFDNLRQVQCVSFIAFRPPGCE

SEQ ID NO: 10840 - protein, 150 aa, Chlamydia trachomatis D/UW-3/CX
MQLTSQAFSYGRPIPKKYSCQGVGISPPLSFSDVPREAKSLVLIVEDPDVPPSVREDGLWIHWIVYNLSPVVSNLAEGAQIFAVQGLNTAGEIGYCPPCPPDAKHRYYFYAYALDVVLSDEEGVTKEQLLEAMDGHIIATAELMGTYEKD

SEQ ID NO: 10841 - protein, 229 aa, Glycine max
  misc_feature (204)..(204): Xaa can be any naturally occurring amino acid
  misc_feature (206)..(206): Xaa can be any naturally occurring amino acid
MWMILLRKRQVVVVVVLSLLQCSVRVDSVFCFSVQVVVHKNSPRETHFRRAGPRQKVYFESEDVYACIVTCGGLCPGVNTVIREIVCGLYHMYGVHKVLGIEGGYRGFYSCNTIPLTPKVVNDIHKRGGTILGTSQGEGGNDTLKIVDSIQDRGINQVYILGGDGTQRGASVIFEEIRRRGLKGSVVGIPESVDNDIPVIDKSXFXFDTAGEEAQRAINAAHVEAESTE

SEQ ID NO: 10842 - protein, 482 aa, Gibberella zeae PH-1
MPPPQLRGFGGGPAVAAPYHQGGFPSHGQPQGGMPGANQYMNANAQLGPFSANGNAFTSGLNSLNTQGFADTGFGSQSARMGFHGPAAALQQSQHGLHQNMLMEHPTIRSQPNKGRIREVWKHNLHEEMAVLRDLVDKYPYIAMDTEFPGVVSRPMGGFRGKSDYHYQCLRTNVDMLKVIQIGLTFFNEDGETPPARPTNDLKLGTAAQKAATNAPFPCSWQFNFKFSITDDMYNEKSIESLQQAGINFELLDRDGIDPHEFASLLIPSGLVCFDNVRWISFHGGYDFGYLTKLLICLPLPNDEVDFDHKMKLYFPTTYDVKHLMKHAIRLHNSGLLTPSDPSSAEILQKFEHKSGLENIAETLKIKRVGSAHQAGSDSLLTGKVFFSMRDKIFAGDIPDEHVGKVWGLGFPDSNSNIISMNQQNNNDGQTNGNAPSTPNTTSVGLATTPGPQGHNGILNTGPMTPGGGGGVFGSFAFGGNR

SEQ ID NO: 10843 - protein, 444 aa, Glycine max
MESKPHVLMQRYELGRLLGQGTFGKVYYARSTITNQSVAIKVIDKDKVMRTGQAEQIKREISVMRLARHPNIIQLFEVLANKSKIYFVIEYAKGGELFNKVAKGKLKEDVAHKYFKQLISAVDYCHSRGVYHRDIKPENILLDENGNLKVSDFGLSALVDSKRQDGLLHTPCGTPAYVAPEVIKRKGYDGYLPFHDPNLIEMYRKISKAELKCPNWFPPEVCELLGMMLNPNPETRIPISTIRENSWFKKGQNIKNKRPVVENNTVSSSSTVLLDQNDCDGLAAEANGESVVPLSINAFDIISRSVGFDLSRFFDESFKKKEARFSSRLPANVIISKLEDIANQLRMKIKKKAAGLLKLESLNEGRKGVLSIDAEIFEVTPCFHMVEVKKSNGDTLEYQKILKEDIRPALQDIVWVWQSDQQLQSQQSEQQQQTDDQQQQQPQS

SEQ ID NO: 10844 - protein, 302 aa, Zea mays
  misc_feature (92)..(92): Xaa can be any naturally occurring amino acid
MVIRSFATTSLIAAFFAIAHLAAWVTPPQAAATAAPPSSPDTASFLRCLGAHLPPQAVYTNASRSYTSVLESSIKNLLFVTPATPTPVAIVXPATRPTSQAAVRCGARHGVGVRPRSGGHDYEGLSYRSLSARRPFAVVDLARLRAVSVDARNRTAWVGSGATLGELYYAIASRSARLGFPGGVGPTVGVGGHLSGGGFGLLLRKHGLAADHVVDAVVVDAAGSLRDRAAMGEDLFWAIRGGGGGSFGVVLSWKLRLVRVPPVVAVSTVHRPRNQSASALLARWQHVAPALPRDAILRVVLQ

SEQ ID NO: 10845 - protein, 293 aa, Hordeum vulgare subsp. spontaneum
MSPTLSLKLKKSSHTPQSSVSSSTKLRLFKKEAACQSPSTLPVAMDMGLEVSSSSPSSSSVSSSPEHAARRASPAKRPAGRTKFRETRHPVYRGVRRRRNTERWVCEVRVPGKRGARLWLGTYATAEVAARANDAAMLALGGRSAACLNFADSAWLLAVPSALSDLADVRRAAVEAVADFQRREAADGSLAIAVAKEASSGAPSLSPSSGSDSAGSTGTSEPSANGVFEGPVVMDSEMFRLDLFPEMDLGSYYMSLAEALLMDPPPTATIIHAYEDNGDGGADVRLWSYSVDM

SEQ ID NO: 10846 - protein, 165 aa, Avena sativa
VTASSATSVAPFQGLKSTAGLPVGRRSNAGLGNVSNGGRIRCMQVWPIEGIKKFETLSYLPPLSEEALLKQIDFLIRSKWVPCLEFSKVGFIFREHGSTPGYYDGRYWTMWKLPMFGCTDASQVIKEVEEVKKEYPDAYVRIIGFDNIRQVQCVSFIAFKPPGCE

SEQ ID NO: 10847 - protein, 584 aa, Glycine max
  misc_feature (24)..(24): Xaa can be any naturally occurring amino acid
  misc_feature (261)..(261): Xaa can be any naturally occurring amino acid
  misc_feature (528)..(528): Xaa can be any naturally occurring amino acid
MCGILAVLGCSDDSRAKRVRVLEXLSRRLKHRGPDWSGLHQHGDCFLAHQRLAIVDPASGDQPLFNEDKSVIVTVNGEIYNHEELRKQLPNHKFRTGCDCDVIAHLYEEHGEDFVDMLDGIFSFVLLDTRDNSFIVARDAIGVTSLYIGWGLDGSVWISSEMKGLNDDCEHFECFPPGHLYSSKERGFRRWYNPPWFSEATPSTPYDPLVLRHTFEQAVIKRLMTDVPFGVLLSGGLDSSLVASVTSRYLANTKAAEQWGXKLHSFCVGLEGSPDLKAAKEVADYLGTVHHEFTFTVQDGIDAIEDVIYHVETYDVTTIRASTPMFLMSRKIKSLGVKWVISGEGSDEIFGGYLYFHKAPNKEEFHRETCRKIKALHQYDCLRANKSTFAWGLEARVPFLDKAFINTAMSIDPESKMIKRDEGRIEKWILRRAFDDEEHPYLPKHILYRQKEQFSDGVGYSWIDGLKAHAAKHVTDKMMLNAGNIYPHNTPTTKEAYYYRMIFERFFPQNSARLTVPGGASVACSTAXKAVEWDAAWSNNLDPSGRAALGVHISAYENQNNNKGVEIEKIIPMDAAPLGVAIQG

SEQ ID NO: 10848 - protein, 165 aa, Aegilops speltoides
VMASSATTVAPFQGLKSTAGLPVSRRSSASLGSVSNGGRIRCMQVWPIEGIKKFETLSYLPPLSTEALLKQVDYLIRSKWVPCLEFSKVGFVFREHNSSPGYYDGRYWTMWKLPMFGCTDATQVLSEVEEVKKEYPDAYVRVIGFDNLRQVQCVSFIAFRPPGCE

SEQ ID NO: 10849 - protein, 435 aa, Arabidopsis thaliana
MEEERRVLFGKYEMGRLLGKGTFAKVYYGKEIIGGECVAIKVINKDQVMKRPGMMEQIKREISIMKLVRHPNIVELKEVMATKTKIFFVMEFVKGGELFCKISKGKLHEDAARRYFQQLISAVDYCHSRGVSHRDLKPENLLLDENGDLKISDFGLSALPEQILQDGLLHTQCGTPAYVAPEVLKKKGYDGAKADIWSCGVVLYVLLAGCLPFQDENLMNMYRKIFRADFEFPPWFSPEARRLISKLLVVDPDRRISIPAIMRTPWLRKNFTPPLAFKIDEPICSQSSKNNEEEEEDGDCENQTEPISPKFFNAFEFISSMSSGFDLSSLFESKRKVQSVFTSRSSATEVMEKIETVTKEMNMKVKRTKDFKVKMEGKTEGRKGRLSMTAEVFEVAPEISVVEFCKSAGDTLEYDRLYEEEVRPALNDIVWSRAR

SEQ ID NO: 10850 - protein, 350 aa, Escherichia coli O157:H7 EDL933
  misc_feature (203)..(203): Xaa can be any naturally occurring amino acid
MRFLLGVLMLMISGSALATIDVLQFKDEAQEQQFRQLTEELRCPKCQNNSIADSNSMIATDLRQKVYELMQEGKSKKEIVDYMVARYGNFVTYDPPLTPLTVLLWVLPVVAIGIGGWVIYARSRRRVRVVPEAFPEQSVPEGKRAGYVVYLPGIVVALIVAGVSYYQTGNYQQVKIWQQATAQAPALLDRALDPKADPLNEEXMSRLALGMRTQLQKNPGDIEGWIMLGRVGMALGNASIATDAYATAYRLDPKNSDATLGYAEALTRSSDPNDNRLGGELLRQLVRTDHSNIRVLSMYAFNAFEQQRFGEAVAAWEMMLKLLPANDTRRAVIERSIAQAMQHLSPQESK

SEQ ID NO: 10851 - protein, 154 aa, Aegilops speltoides
VMASSATTVAPFQGLKSTAGLPVGRRSSGSLGSVSNGGRIRCMQVWPIEGIKKFETLSYLPPLSTEALLKQVDYLIRSKWVPCLEFSKVGFVFREHNSSPGYYDGRYWTMWKLPMFGCTDATQVLSEVEEVKKEYPDAYVRVIGFDNLRQVQCV

SEQ ID NO: 10852 - protein, 487 aa, Salmonella enterica subsp. enterica serovar Dublin
MKKINHWINGQNVAGDDYFQTTNPATGDVLAEVASGGEAKLNQAVAAAKEAFPKWANLPMKKRARLMRRLGDLIDQNVPEIAAMETADTGLPIHQTKNVLIPRASHKFEFFAEVCQQMNGKTYPVDDKMLNYTLVQPVGVCALVSPWNVPFMTATWKVAPCLALGNTAVLKMSELSPLTADRLGELALEAGIPAGVLNVVQGYGATAGDALVRHHDVRGVSFTGGTATGRNIMKNAGLKKYSMELGGNSPVLIFEDAEIERALEAALFTIFLINGERCTAGLSIFIQQSIYPEFVKRFAERANRLRVGDPTDPNTQVGALISQQHWEKVSGYIRLGIEEGATLLAGGAEKPTDLPAHLKGGNFLRPTVLADVDNRMRVQEEIFGPVACLLPFKDEAEGLRLANDVEYGLASYIWTQDVSKVLRLARAIEAGMVFVNTQNVRDLRQPFGGVKASGTGREGGEYSFEVFAEMKNVCISMGDHPIPKWGV

SEQ ID NO: 10853 - protein, 184 aa, Triticum aestivum
PGIYLHSTTLAPPRDGLSATSVVPFPGLSPTAALPVSPAPNGASFGSVSNGGRIRCMQVWPIEGIKKFETLSYLPPLSTEALLKQVDYLIRSKWVPCLEFSKVGFIFREHNTSPGYYDGRYWTMWKLPMFGCTDATQVINEVEEVKKEYPDAYVRIIGFDNMRQVQCVSFIAFKPPACEESGKA

SEQ ID NO: 10854 - protein, 506 aa, Yersinia pseudotuberculosis
MRYAHPGTPEALVSFKAIYGNYIGGEFIEPLGGQYFMNTSPVNGSDIAQFPRSDARDIDAALDAAHQAADAWGKTSVQHRSNLLLQMADRIEANLEYLAVAESWDNGKPIRETLNADLPLAVDHFRYFAGCLRAQEGGVAEIDEKTVAYHFHEPLGVVGQIIPWNFPLLMAAWKLAPALAAGNCVVLKPAEQTPLGITLLLELVGDIFPAGVINVVQGYGREAGEALARSKRIAKIAFTGSTPVGRHIMACAAENIIPCTVELGGKSPNIYFADVMEAEPEFIDKAVEGLVLGFFNQGEVCTCPSRALIHESIYAPFMARVMTKVANIRRGDPLDTETMIGAQASRQQFDKILSYIDIARKEGGEILTGGARATITPALDSGFYIQPTLIKGDNLMRCFQEEIFGPVIGVTTFKDEAEALAIANQTQFGLGAGIWTRDAHLAYRMGRGIKAGRVWTNCYHVYPAHAAFGGYKQSGVGRETHKMALNQYQQTKNLLVSYDTAPLGLF

SEQ ID NO: 10855 - protein, 496 aa, Thlaspi arvense
MDLLYIVAALVIFASLLIAKSKRKPKKNLPPGPPRLPIIGNLHQLGEKPHRAMVELSKTYGPLMSLKLGSVTTVVATSVETVRDVLKTYDLECCSRPYMTYPARITYNLKDLVFSPYDKYWRQVRKLTVVELYTAKRVQSFRHIREEEVASFVRFNKQAASSEETVNLSQKILKMSGSVICRIGFGINLEGSKLENTYQEIIVQAFEVLGSLAAVDYFPVIGTIIDRITGLHAKCEKVFHGIDSFFDQAIQRHIDDPSIKDDIIDLLLKMERGEGSLGEYELTREHTKGILMNILTAGIDTSAQTMTWAMTHLLANPRVMKKLQAEIREKIKNIDEITDDDVEQLDYFKLVLKETFRISPIVPVLVPRVAAKDLKIAGYDVPEKTWIHVNMWAVHMSPSIWKDPETFNPERFIDNQTDFKGLNFELLPFGSGRRMCPGMGMGLAVVHLTLINLLYRFDWKLPNGMKAEELSIEENYGLICVKKLPLEAIPVLTQWT

SEQ ID NO: 10856 - protein, 322 aa, Candida tenuis
MSASIPDIKLSSGHLMPSIGFGCWKLANATAGEQVYQAIKAGYRLFDGAEDYGNEKEVGDGVKRAIDEGLVKREEIFLTSKLWNNYHDPKNVETALNKTLADLKVDYVDLFLIAFPIAFKFVPIEEKYPPGFYCGDGNNFVYEDVPILETWKALEKLVAAGKIKSIGVSNFPGALLLDLLRGATIKPAVLQVEHHPYLQQPKLIEFAQKAGVTITAYSSFGPQSFVEMNQGRALNTPTLFAHDTIKAIAAKYNKTPAEVLLRWAAQRGIAVIPKSNLPERLVQNRSFNTFDLTKEDFEEIAKLDIGLRFNDPWDWDNIPIFV

SEQ ID NO: 10857 - protein, 164 aa, Zea mays
FQAGTGIAELIALEISKQTNAPIEECRKKVWLVDSKGLIVDSRKGSLQPFKKPWAHEHEPLKTLYDAVQSIKPTVLIGTSGVGRTFTKEIIEAMSSFNERPIIFSQKKPTSHSECTAEQAYTWSQGRSIFASGSPFAPVEYEGKTFVPVHAYMIYICCNVVKAN

SEQ ID NO: 10858 - protein, 356 aa, Magnaporthe grisea
MSRANPPSNSSGSRKISFNVSEQYDIQDVVGEGAYGVVCSAIHKPSGQKVAIKKITPFDHSMFCLRTLREMKLLRYFNHENIISILDIQKPRSYETFNEVYLIQELMETDMHRVIRTQDLSDDHCQYFIYQTLRALKAMHSANVLHRDLKPSNLLLNANCDLKVCDFGLARSAASQENNSGFMTEYVATRWYRAPEIMLTFKEYTKAIDVWSVGCILAEMLSGKPLFPGKDYHHQLTLILDVLGTPTMEDYYGIKSRRAREYIRSLPFKKKVPFRTLFPKTSDLALDLLEKLLAFNPVKRITVEEALKHPYLEPYHDPDDEPTAPPIPEEFFDFDKHKDNLSKEQLKQFIYQEIMR

SEQ ID NO: 10859 - protein, 130 aa, Glycine max
  misc_feature (14)..(14): Xaa can be any naturally occurring amino acid
MAPAVMASSATTVXAPFQGLKSTAGLPVSRRSGSAGLSSVSNGGRIRCMQVWPIEGIKKFETLSYLPPLSTEALLKQVDYLIRSKWVPCLEFSKVGFVFREHNSSPGYYDGRYWTMWKLPMFGCTDATQV

SEQ ID NO: 10860 - protein, 480 aa, Listeria monocytogenes str. 4b F2365
MQIKNKAMLITYSDSLGKNMEELSKVMETYFEDAVGGIHLLPFFPSTGDRGFAPSDYTTVDSDLGSWEIIEKLGEKYYLMFDFMINHISRESLFFQDFKKEHLNSKYKDMFIRINDFFPPGRPNEKDLDLIYKRKDKAPFQEVEFADGGTELVWNTFGEEQIDLDVTAEVTKEFIRQTIKNMAAHGCSILRLDAFAYAIKKLDTNDFFVEPEIWDLLDEVKAEAAKYDMELLPEIHEHYSIQMKIANHDYYIYDFALPMVMLYSLYSGRVERLAKWLEMSPMKQFTTLDTHDGIGVVDARDLLTDEELDYTSAELYKIGANVKKIYSSEKYNNLDIYQINSTYYSALGDDDKSYLLARVIQCFAPGIPQIYYVGLLAGKNDIDLLEETKEGRNINRHYYTIDEIKNEVKRPVVKALCNLLRFRNTSEAFDLEGSIEIETPSSNEIVIIRKNKTNKITATLKANLSTKTFQISENERNILI

SEQ ID NO: 10861 - protein, 184 aa, Zea mays
  misc_feature (85)..(85): Xaa can be any naturally occurring amino acid
  misc_feature (90)..(90): Xaa can be any naturally occurring amino acid
  misc_feature (100)..(100): Xaa can be any naturally occurring amino acid
  misc_feature (129)..(129): Xaa can be any naturally occurring amino acid
  misc_feature (141)..(141): Xaa can be any naturally occurring amino acid
  misc_feature (148)..(148): Xaa can be any naturally occurring amino acid
  misc_feature (160)..(160): Xaa can be any naturally occurring amino acid
MASSMLSSATVVSSPAQAAMVAPFTGLKSSAAFPVTRKTDTDITSMASNGGRVNCMKVWPPVGKKKFETLSYLPDLTDVELSKEXVDYLXFRNKWIPCVXEFELEHGFVYREHGNPPGYYDGRYWNNVXNFPWFRCTDSAXQVLKEVXEGKKEYPKRFLXILGFQKKRQGPGFFFFPQKPPNFR

SEQ ID NO: 10862 - protein, 335 aa, Thermoplasma volcanium GSS1
MKAAILKKINEPVSIDDVDIPDPAENEVLIKQEYAGVCYRDLLAATGFFPRIALPMIQGHEIGGTVVKVGDKVEAFRPGDKVSSLIYIPCGKCEFCRSGNENLCPYKKSLGEEVQGGFRQYVNIPEISLVKAPNNVDGASLSLAACVTGMLYHALKRMGKAGEGKKVLITGAGGGVGIHAVEMAKAFGATVIAETTSPEKLDLLEKIGADYIVDGNSKFNEDVKKLGGADIVLECVGIYTFERSLRSLNNGGKMVIIGNVKPDPVSLPLGLIILKGNTIRGSISSTKKDVEEALNMVSKGMIKPIVGKEIDISQINEAYKLMKDKKSSGRIMIKF

SEQ ID NO: 10863 - protein, 308 aa, Mesorhizobium sp. BNC1
MKTYKLVNRDVSAPGRDSAADADGSGVEMPMIGLGVFQTPPDETTAAVEEALRLGYRHIDTAAAYGNEREVGEGIRRAGIARDEVFIETKIWISDYGYDETLHAFDKSAGKLGVDQIDLLLLHQPLPSAFDRTLGAYRALEKLLADGKVRAIGVSNFMPEHLTRLLTETSIVPAVNQIEVHPYFQQRALQRLHAEHGILTQAWSPIGGITFYRGGEKSTLEDPVLLEIAQQHGKSAAQVMLRWHLQEGRSVIPKSTKPARIAENFDVFDFELSGEQIAAIDALDTGVRSGPEPDSITLESYGRPIPEA

SEQ ID NO: 10864 - protein, 283 aa, Listeria innocua Clip11262
MKTVKLNNGIEVPILGFGTYQITDAGEAEQAVKEAIAAGYRHIDTAQSYMNEEAVGRGIAASGVDRKELFITTKIWVENVSYKGVMSSFDRSLKRLGLDYIDLLLIHQPYNDVYGAWMAMEELQAQGKIKAIGVSNFGVDRVVDLAAFNDITPQVNQIEINPFQQQSKNIEALRKEGVAVEAWAPFAEGKNDIFTNPILTKIAEKYGKSVAQVILRWLIEQDIIVLAKSVKPERMAQNLAVFDFELSEEDKSAIATLNQGESQFFSHADPEMVKWMASRKINI

SEQ ID NO: 10865 - protein, 259 aa, Triticum aestivum
  misc_feature (122)..(122): Xaa can be any naturally occurring amino acid
  misc_feature (198)..(198): Xaa can be any naturally occurring amino acid
  misc_feature (204)..(204): Xaa can be any naturally occurring amino acid
  misc_feature (215)..(215): Xaa can be any naturally occurring amino acid
MKTLLILTILAMAITISTANMQVDPSGQVQWPQQQLVPQPQQPLSQQPQQAFPQPQQTFPHQPQQQVPQPQQPQQPFLQPQQAFPQQPQQPFPQTQQPQQPFPQQPHQPFPQTQQPQQPFPXQPQQPFPQTQQPQQLFPQSQQPQQQFSQPQQQFPQPQQPQQSFPQQQPPFIQPSLQQQVNPCKNFLLQQCKPVSLXVSSLWXSMIWPQSDFQXWMRQQCCQQLAQFLKQSQCASIHTIIHSIIKAPFSSVVAGIGGQ

SEQ ID NO: 10866 - protein, 67 aa, Glycine max
MASSVISAPAGTTVNRAGAGMVAPFTGLKSMAGCPSRRTKNDVSSIASSGGRVQCMQVWPPVGREEV

SEQ ID NO: 10867 - protein, 279 aa, Enterococcus faecalis V583
MITSLADTVTLNNGTKIPGMGLGVFQIPDEETAKVVEEGIINGYRLIDTAQIYGNESGTGAGIKAGLAATGLNREDLFVTSKVWNAHISYDETIQAFNDSLERLGLDYLDLYLIHWPGNNSYKESWQALETLYAEGKVKAIGVSNFQVHHLEDLLSYAKVVPVINQVELHPKLDQKEVRDFCEKHDIKVQAWSPLMQGQLLSNETILAIAENHNKSAAQVILRWDIQQDILLAVKSVHKERMISNAAVFDFELSAEEMAQINQLNESLRVGPDPDTFDF

SEQ ID NO: 10868 - protein, 287 aa, Hordeum vulgare subsp. spontaneum
MSPTLSLKLKKSSHTPQSSVSSSTKLRLFKKEAACQSPSTLPVAMDMGLEVSSPSPFSSSVSSSPEHTAKRPAGRTKFRETRHPVYRGVRRRGNTERWVCEVRVPGKRGARLWLGTYATAEVAARANDAAMLALGGRSAACLNFADSAWLLAVPSALSDLADVRRAAVEAVADFQRREAADGSLAIAVPKEASSGAPSLSPSSGSDSAGSTGTSEPSANGVFEGPVVMDSEMFRLDLFPEMDLGSYYMSLAEALLMDPPPTATIIHAYEDNGDGGADVRLWSYSVDM

SEQ ID NO: 10869 - protein, 287 aa, Hordeum vulgare subsp. spontaneum
MSPTLSLKLKKSSHTPQSSVSSSTKLRLFKKEAACQSPSTLPVAMDMGLEVSSPSPFSSSVSSSPEHTAKRPAGRTKFRETRHPVYRGVRRRGNTERWVCEVRVPGKRGARLWLGTYATAEVAARANDAAMLALGGRSAACLNFADSAWLLAVPSALSDLADVRRAAVEAVADFQRREAADGSLSIAVPKEASSGAPSLSPSSGSDSAGSTGTSEPSANGVFEGPVVMDSEMFRLDLFPEMDLGSYYMSLAEALLMDPPPTATIIHAYEDNGDGGADVRLWSYSVDM

SEQ ID NO: 10870 - protein, 431 aa, Deinococcus radiodurans R1
MGERKCGGWPPKVFLHSLSPGGAGGSTKAVVWHGIGDIRLDDVPEPKIEAPTDAIVRLTASAICGTDLHFIRGTMSDMVPGTILGHEGVGIVEAVGPEVRNFVPGDRVVIPSSASCGYCPPCREGNTSQCDNANPNGPSAGTAFYGGPKSSGPLNGMQAEKVRVVYANSSLVKLPDNVSDDQAIMISDIFPTAYFGAEIAGVKTGSVVVVLGCGPVGQFSIISAKLLGATRVIAVDRLDDRLDMARKNGAEVINFEKEDPVEAVKKLTGGLLADCVIDAVGVDAQHAHAGPAKPDAEKEQKFEQEVQEVAPDAKPEKDGQWTPGDAPSQASEWAIEMTKKAGQIGIIGVYSPQMTTYPIGKAMNKNLTIRMGNCNHRAIIPGLVDLVAAGVVDPARVLTEHEHLGSAIEAFEAFDKRQPGWIKVELEPQAG

SEQ ID NO: 10871 - protein, 169 aa, Sinorhizobium meliloti 1021
MQRSLRHLLVHGRRQLMTFSLISPVFADGQPIPQKYTRFGENLFPPLKWTGTPEATQSFALIVEDPDAVSGLFRHCSIINIPGSWTELPQAVDTGPERGIKFIRNDFGNARYDGPQPPSGTGVHRYRFRLAALDAANLSIPDDVGAAEAWERACKHLIGEAEIVGTYEG

SEQ ID NO: 10872 - protein, 287 aa, Hordeum vulgare subsp. spontaneum
MSPTLSLKLKKSSHTPQSSVSSSTKLRLFKKEAACQSPSTLPVAMDMGLEVSSPSPFSSSVSSSPEHTAKRPAGRTKFRETRHPVYRGVRRRGNTERWVCEVRVPGKRGARLWLGTYATAEVAARANDAAMLALGGRSAACLNFADSAWLLAVPSALSDLADVRRAAVEAVADFQRREAADGSLAIAVPKEASSGAPSLSPSSGSDSAGSTGTSEPSANGVFEGTVVMDSEMFRLDLFPEMDLGSYYMSLAEALLMDPPPTATIIHAYEDNGDGGADVRLWSYSVDM

SEQ ID NO: 10873 - protein, 171 aa, Oryza sativa (japonica cultivar-group)
MAAAPSATSVHDFTVKGVQDASGKDVNLSTYKGKVLLIVNVASQCGLTNSNYTELSQLYEKYKVQGFEILAFPCNQFGGQEPGSNEEIVQFACTRFKAEYPIFDKVDVNGNNAAPLYKYLKSNKGGLFGDSIKWNFSKFLVDKEGRVVDRYAPTTSPLSIEKDIKKLLGSS

SEQ ID NO: 10874 - protein, 364 aa, Haloarcula marismortui ATCC 43049
MQGADADTVADALASDDALPGAGGFAGELDGTLVRDVLGRYPLFVERAVSDEARLDPGQWSHDPTALADPRSFPAGHIRNESGTQQRWSLPSLDPFGDRETAIETVGETVETSIDAVDTDSLAIAFSGGVDSALLAARLDAPLYVAGFPDSHDIEAARSAAELLGTEVRVVELTHDAIERAVPEIARATARTNAMDVQIALPLYLVAERVAGDGFDRLALGQGADELFGGYAKVAKAPEDPRVEADTVRGAQREVIASLPDQLERDVLALRAAGVEPVTPLLHDRVIGAALRLDGDLLVDGETRKVALRAAARESLPDEIADRDKKAAQYGSLAARELDRLARQAGYKRRMDDHVTQYVESLVE

SEQ ID NO: 10875 - protein, 243 aa, Methanococcoides burtonii DSM 6242
MYANIRPIKPLPGLIGVTGKNDFDLVIVRENTEGMYSSIEEIHDDVAYTKRVVSRKGSERIARSACKLAKERKNQVTIVHKSNVLKSDTLFLGVCREVAASEGVEYSDMLVDAMAYSLMSYPERYDVVVTTNLFGDILSDMSAALVGSLGLVPSANIGDKYAFFEPVHGSAPDIAGKGIADPIAAILSMKMMLEWMGYEREAVLVENAVSSSIKENMTTPDLGGSSNTSDVGKVIADHVRNNL

SEQ ID NO: 10876 - protein, 375 aa, Nicotiana tabacum
MEVISTNTNGSTIFKNGAIPMNGHQNGTSEHLNGYQNGTSKHQNGHQNGTFEHRNGHQNGTSEQQNGTISHDNGNELLGSSDSIKPGWFSEFSALWPGEAFSLKVEKLLFQGKSDYQDVMLFESATYGKVLTLDGAIQHTENGGFPYTEMIVHLPLGSIPNPKKVLIIGGGIGFTLFEMLRYPSIEKIDIVEIDDVVVDVSRKFFPYLAANFNDPRVTLVLGDGAAFVKAAQAGYYDAIIVDSSDPIGPAKDLFERPFFEAVAKALRPGGVVCTQAESIWLHMHIIKQIIANCRQVFKGSVNYAWTTAPTYPTGVIGYMLCSTEGPEVDFKNPVNPIDKETTQVKSKLGPLKFYNSDIHKAAFILPSFARSMIES

SEQ ID NO: 10877 - protein, 466 aa, Escherichia coli O6
MDKKQVTDLRSELLDSRFGAKSISTIAESKRFPLHEMRDDVAFQIINDELYLDGNARQNLATFCQTWDDDNVHKLMDLSINKNWIDKEEYPQSAAIDLRCVNMVADLWHAPAPKNGQAVGTNTIGSSEACMLGGMAMKWRWRKRMEAAGKPTNKPNLVCGPVQICWHKFARYWDVELREIPMRPGQLFMDPKRMIEACDENTIGVVPTFGVTYTGNYEFPQPLHDALDKFQADTGIDIDMHIDAASGGFLAPFVAPDIVWDFRLPRVKSISASGHKFGLAPLGCGWVIWRDEEALPQELVFNVDYLGGQIGTFAINFSRPAGQVIAQYYEFLRLGREGYTKVQNASYQVAAYLADEIAKLGPYEFICTGRPDEGIPAVCFKLKDGEDPGYTLYDLSERLRLRGWQVPAFTLGGEATDIVVMRIMCRRGFEMDFAELLLEDYKASLKYLSDHPKLQGIAQQNSFKHT

SEQ ID NO: 10878 - protein, 78 aa, Brassica napus
MGFWTLMEGLLLFANALAILNEDRFLAPRGWTLTELHQTGKRNSLKGQIVGLIHACHYMRLPLMLFNLIVIVFKLFSG

SEQ ID NO: 10879 - protein, 394 aa, Vibrio vulnificus CMCP6
MLSENTINIVKSTAPLLAETGPKLTAHFYQRMFEHNPELKDIFNMSNQRNGDQREALFNAICAYASNIDNLPALLGAVEKIAHKHSSFLITADQYQIVGGHLLATIDELFSPGQAVLDAWAEAYGVLANVFIQREEQIYQDNQSQTGGWRGLREFELVEKQYESAHICSFVFKPVDGGSVVSFKPGQYLGIYINDEQFENQEIRQYSLSSSVRPDCYRISVKREEGGRVSNYLHDHLDVGSKVKLAAPAGDFFLDAAPTAPVVLISAGVGLTPTLSMLESLTEHQAPVTWIHATENGQQHAFKQHVKQLVETHPHFNSLVWYNQPNSDDKIGDDFQFSGWVNLHEIETVLKQADVQVYFCGPVGFMQFIAKQLLEMGVPEQQFHYECFGPHKVV

SEQ ID NO: 10880 - protein, 400 aa, Bordetella bronchiseptica RB50
MSTSQKKPTVQQKKPAAQPAEKAAFKPKKSVALSGVVAGNTALCTVGRTGNDLHYRGYDILDFAGSAEFEEIAHLLVHGKLPNKAELKAYKEKLRALRGLPAQLQNVLECLPASSHPMDVMRTAVSVLGCVLPEKDDHNTPGARDIADRLMANLGSALLYWYHYSHNGRVIDVQTDDDSIGGHFLHLLHGAKPSDEWVRAMHTSLILYAEHEFNASTFTGRVIAGTGSDMYSSITGAIGALRGPKHGGANEVAFEVQKRYETPDEAEADIRQRVENKEVIIGFGHPVYTVSDPRNKVIKDVAKKLSRKAGSTKMFDIAERLETVMWDIKKMFPNLDWFSAVSYHMMGVPTAMFTPLFVIARTAGWSAHIIEQRIDNKIIRPTANYVGPEDQTYVPISKRA

SEQ ID NO: 10881 - protein, 317 aa, Escherichia coli O6
MTDKLTSLRQYTTVVADTGDIAAMKLYQPQDATTNPSLILNAAQIPEYRKLIDDAVAWAKQQSNDRAQQIVDATDKLAVNIGLEILKLVPGRISTEVDARLSYDTEASIAKAKRLIKLYNDAGISNDRILIKLASTWQGIRAAEQLEKEGINCNLTLLFSFAQARACAEAGVFLISPFVGRILDWYKANTDKKEYAPAEDPGVVSVSEIYQYYKEHGYETVVMGASFRNIGEILELAGCDRLTIAPALLKELAESEGAIERKLSYTGEVKARPARITESEFLWQHNQDPMAVDKLAEGIRKFAVDQEKLEKMIGDLL

SEQ ID NO: 10882 - protein, 154 aa, Glycine max
VSYGVEFEGAGASKESKVNGDGGRDVNLGDSNYSFGEAEALSDEMEEESRYVAEILRIRDVLLNPEDESEAVLFDSLRRLQMMELTEDCLKATEIGKAVNPLRKHGSKDIRQLSRTLIDGWKEMVDEWVKATTTTAITGSEEGTPDSANPSVVD

SEQ ID NO: 10883 - protein, 448 aa, Deinococcus radiodurans R1
MSLDLLLRGAVLVTPEGERRADLGIVGGQIAELTDEIATPAAQTLDVSGLHVFPGVLDDHVHLNEPGRTHWEGFETGTQALAAGGATSFLDMPLNSSPPVLTRERFEDKARLGEEKSLIDFGLWGGLTPLNLDQLDDLAECGVIGLKAFMSHSGLDEFPAADDLTLYEGMRTAKRHGLVVATHAESNEFTRRLTETARAQGKSGVRDYLESRPVVTELEAVQRALLFAQDTGAALHLVHVSSGAAVALAYEGKQKGIDVTIETCPHYLHFTGEDVERVGAALKCAPPLRDPAVQEELWRELLAGHIDTVGSDHSPAPPDMKTSEDFFSLWGGISGAQSTLNVMLEDGYAQRGLPLEIIAALLALNPAQRFGLPQKGRLAVGADADFALVALGEKFTLDTLYDRWQQNPYRGQSFQGRVHATYLRGQPVYQNGEFTGTPRGRLLRPRSL

SEQ ID NO: 10884 - protein, 433 aa, Leptospira interrogans serovar Lai str. 56601
MIWYPFTLQFEPDSPLKIERAKGEFLYDELGNSYIDGISSWWVSIHGHNHPKIVQAVKNQLEKLDHVLLAGFTHDPAEKLAAELLKITDGLFQKVLYSDNGSTAVEIMIKLAYQYFQNIGEVDRKIFIKWNSSYHGDTIGTMSVGGNSVFNRVFQGLMFPTKEFQTPNCNFCPMGKKPESCKVECIDPIEKFFQKSPKAVAGIVIEPLILGSGGMIFYKEEVLQRLETISKKYGSLLLLDEVFTGFGRTGSVFAYQRAKIRPDFIALAKGLSAGVSAVAVTLTTDRIHSAFVTADPEKGFYHGHTMTGNPIACSAALASLKIFFEENRLEQILRLESKLNVGLKKIAKEFPKAVKNCRVLGAVGVLELEVGKASGYHYPGNKILKKKFLEKGVLLRPLGNVIYLTPPYNIENSSLEKIFSAIRETLSEISFGN

SEQ ID NO: 10885 - protein, 191 aa, Ustilago maydis 521
MQTIKCVVVGDGAVGKTCLLISYTTNKFPSEYVPTVFDNYAVTVMIGEDPYTLGLFDTAGQEDYDRLRPLSYPQTDVFLVCFSVTSPASFENVKEKWFPEVHHHCPGVPCLIVGTQVDLRDDHAVIEKLARSKQRPVPFEAGERLARELGAVKYVECSALTQKGLKNVFDEAIVAALEPPVIRKKSKCAIL

SEQ ID NO: 10886 - protein, 426 aa, Enterococcus faecium
MKTLIKNGQINTRKNMTTPAEIWIEDGRIKAIGTGFSEAEFDEVFDAKGQLITPGLVDVHVHLREPGFTYKETIEAGTRSAARGGFTTVCAMPNLNPVPDTAEKLRQVYDIIRKDAVVKVLQYAPITENLRSEKLVDQEALIEEGAFAFTNDGVGVQTAGTMYLAMKEAAKNNKALVAHTEDESLLFGGVMHAGKKAEELGLPGILSVTESSQIARDLLLAEATGVHYHVCHVSTKESVRVIRDAKKAGIHVTAEVSPHHLILIDEDIPEDFGFWKMNPPLRGREDREALIEGLLDGTIDCIATDHAPHGLEEKSQSFMKSPFGIVGSETAFQLIYTHFVETGRFTLEQVINWLAVKPAEIFGLNAGTLTVGAPADVAVFDITQTCTIDKEDFLSKGENTPFIGWKVKGETQMTFVNGKLVWQKGE

SEQ ID NO: 10887 - protein, 240 aa, Triticum aestivum
GTRVLQDTLGVCGQIIPWNFPFMMLAWKVAPALACGNTVILKPAEQTPLSALYFGNLVKEAGLPAGVVNVLPGLGPSTGKAIAGHMDIDKVAFTGSTNTGRAIMKDAANNLKNITLECGGKSPSIVFADAELEQAVKWCHFGIMDNKGEVCTSTSRIYVHEDIYDKFLEKFVEVTKENDKLGAPFDESTVQGPQVSKTQYDRVLSYIEEGRKSGAKLLYGGSKHGDKGYFLQPTVFADTT

SEQ ID NO: 10888 - protein, 206 aa, Kluyveromyces lactis
MNSEYDYLFKLLLIGNSGVGKSCLLLRFSDDTYTNDYISTIGVDFKIKTVELDGKTVKLQIWDTAGQERFRTITSSYYRGSHGIIIVYDVTDRESFNGVKMWLQEIDRIATSTVLKLLVGNKCDLKDKRVVEYDVAKEFADANKMPFLETSALDSTNVEDAFLTMARQIKESMSQQNLNETTQKKEDKGNVNLKGQSLTNTGGGCC

SEQ ID NO: 10889 - protein, 463 aa, Crocosphaera watsonii WH 8501
MANLNPTASYSLALTIELPNIAGTLANVTQAIAGAQGSFGQISLIEHNLKITQREITVEASSEEHAEQIVSAVREIPNVKILKVSDRTFELHRKGKITIESRLPLHSQGDLAMAYTPGVGRICKAIATDPSEVYNLTIKNNTVAVVTDGSAVLGLGNLGPEAALPVMEGKAMLFKEFAKVDAFPICLATQDTEEIIETVKRIAPVFGGINLEDIAAPRCFEIEKRLRQELDIPVFHDDQHGTAIVTLAALFNALKLVHKTLEGVRIVINGAGAAGVAIASLLRAAGATTIWLCDSKGLISHNREDLNPQKKAYAVSASGTLADAMQGADVFLGVSAPGVVTPEMVRSMNKDPIVFAMANPIPEIQPELVTNDVAVMATGRSDYPNQINNVLAFPGVFRGALDCRAKNITERMYLEAAKAIASLVHSNQLNAEHIVPSVFDERVSHAVASAVELAARQDGVANQ

SEQ ID NO: 10890 - protein, 158 aa, Glycine max
  misc_feature (98)..(98): Xaa can be any naturally occurring amino acid
  misc_feature (100)..(100): Xaa can be any naturally occurring amino acid
  misc_feature (115)..(115): Xaa can be any naturally occurring amino acid
  misc_feature (130)..(130): Xaa can be any naturally occurring amino acid
MDSSLISFPAVTTVNRAGAGMVAPFTGLKYMAGFPTIKTNNDITSIASNGGRVQCMHVWPPLGKKKLETLYYLADLDDAQLLEEVEYLLRKGWIPCLXIXLEHGFLYREHNRLPXYYDGRYCTMCKLPMXCCTDASQVSEELQEATTAYSSCFMRIIA

SEQ ID NO: 10891 - protein, 362 aa, Sorghum bicolor
MGSTAEDVAAVADEEACMYAMQLASSSILPMTLKNALELGLLEVLQKDAGKALAAEEVVARLPVAPTNPAAADMVDRMLRLLASYDVVRCQMEDKDGKYERRYSAAPVGKWLTPNEDGVSMAALALMNQDKVLMESWYYLKDAVLDGGIPFNKAYGMTAFEYHGTDPRFNRVFNEGMKNHSVIITKKLLEFYTGFDESVSTLVDVGGGIGATLHAITSHHSHIRGINFDLPHVISEAPPFPGVQHVGGDMFKSVPAGDAILMKWILHDWSDAHCATLLKNCYDALPEKGGKVIVVECVLPVTTDAVPKAQGVFHVDMIMLAHNPGGRERYEREFRDLAKAAGFSGFKATYIYANAWAIEFIK

SEQ ID NO: 10892 - protein, 509 aa, Candida boidinii
MTTVRTDAIVIGAGIAGVKASIELTKAGVSNIILEARDRTGGRLNTVKTPNGRSFDLGASWFHDCLDNPLFEKTIAKGDIKFYFDDASLNLYNKDGYIHDDERLVPIFEEMQTYLETYWTPKSRENDVSIREAAYQYLLKKKNVLTDFQLKNAPQLLRSFELWIGSSWDILSARHICGDKHLGRNAFCLDGWSSVYNNELAELSQISGCGDDTKRLETSNKLYLNTEVKKITFSDWRKEITIKTKNTKTNKIDTYICKYIICTAPLSILKLQKNEVGSIEWSPKLPKQISSALDNLSFSALGKILFEFDEVFWPKDSDRFFCLPDYDAEMYNKVKRGDTNSGIEIRTSEKDIKSAPDAEGFTHPVLFLNVYRMNGAPALACLISNPLTKWIEADPQNRAWPVIKPLLAKIVSSLPNAPKEIPAPKSITCTNWTTDPYARGSYTGLTVHDEFEDGIQTLIDAKGIFDGKGRVRFAGEHCILQGSGCAHGAWRSGAREAAEIVKRINNSKL

SEQ ID NO: 10893 - protein, 293 aa, Hordeum vulgare subsp. spontaneum
MSPTLSLKLKKSSHTPQSSVSSSTKLRLFKKEAACQSPSTLPVAMGMGLEVSSSSPSSSSVSSSPEHAARRASPAKRPAGRTKFRETRHPVYRGVRRRGNTERWVCEVRVPGKRGARLWLGTYATAEVAARANDAAMLALGGRSAACLNFADSAWLLAVPSALSDLADVRRAAVEAVADFQRREAADGSLAIAVPKEASSGAPSLSPSSGSDSAGSTGTSEPSANGEFEGPVVMDSEMFRLDLFPEMDLGSYYMSLAEALLMDPPPTATIIHAYEDNGDGGADVRLWSYSVDM

SEQ ID NO: 10894 - protein, 476 aa, Pirellula sp. 1
MNQHSPSYAITIRLRYSDSPGAMGKITTAIGEADGAIGAVDIVNIRGGKISRDFTVNARDVDHGKRIVEHLRTVEEVEVVHTSDRVFLMHLGGKIEVLPKMPIKTRDDLSMAYTPGVARVCNAIAEDPDSSFALTIRQNTVAVVSDGSAVLGLGNIGPRAAMPVMEGKAMLFKEFAGVDAFPICLDTQDTEAIIETVRQLAPTFGGVNLEDISAPRCIEIEERLDKELEIPVFHDDQHGTAIVVLAGLKNSLLRVGKALPNIRIVVNGAGAAGTAIVKLLLISGAKDIVVCDRDGAIHAGEPSQPDASKQWIADNTNPRGASGKLSEVIQGADVFIGVSAPNVLQTEDVAAMAADPIVFALANPDPEILPANAAPHVRIMATGRSDFPNQINNVLCFPGLFRGVLDVRATTINNEMKLAAAEAIAATIPESDLLDDYVIPSVFDRRVAKVVAQAVAKAAVDTGVARRRNKPAEDIM

SEQ ID NO: 10895 - protein, 293 aa, Hordeum vulgare subsp. spontaneum
MSPTLSLKLKKSSHTPQSSVSSSTKLRLFKKEAACQSPSTLPVAMDMGLEVSSSSPSSSSVSSSPEHAARRASPAKRPAGRTKFRETRHPVYRGVRRRGNTERWVCEVRVPGKRGARLWLGTYATAEVAARANDAAMLALGGRSAACLNFADSAWLLAVPSALSDLADVRRAAVEAVADFQRREAADGSLAIAVAKEASSGAPSLSPSSGSDSAGSTGTSEPSANGVFEGPVVMDSEMFRLDLFPEMDLGSYYMSLAEALLMDPPPTATIIHAYEDNGDGGADVRLWSYSVDM

SEQ ID NO: 10896 - protein, 129 aa, Buchnera aphidicola str. Sg (Schizaphis graminum)
MSLGMITMSITKEQILEAVSEMSVMNVVELISAMEKKFGVSANMSVNTNNNSEKSTIEEKTEFDIFLKSIGPNKVSVIKSVRSATGLGLKEAKDLVESAPTVLKENMSKNDAESLKKTLEDAGAEIEIK

SEQ ID NO: 10897 - protein, 411 aa, Rickettsia montanensis
DSEFAELKIRGKIFELPILKASIGEDVIDISRVSAEADCFTYDPGFMSTASCQSTITYIDGDKGILRHRGYDIKDLAEKSDFLEVAYLLIYGELPSGEQYNNFTKQVAHHSLVNERLHYLFQTFCSSSHPMAIMLAAVGSLSAFYPDLLNFKEADYELTAIRMIAKIPTIAAMSYKYSIGQPFIYPDNSLDFTENFLHMMFATPCTKYKVNPIIKNALNKIFILHADHEQNASTSTVRIASSSGANPFACISTGIASLWGPAHGGANEAVINMLKEIGSSEYIPKYIAKAKDKNDPFRLMGFGHRVYKNYDPRAAVLKETCKEVLKELGQLDNNPLLQIAIELEAIALKDEYFIERKLYPNVDFYSGIIYKAMGIPSQMFTVLFAIARTVGWMAQWKEMHEDPEQKISRPR

SEQ ID NO: 10898 - protein, 355 aa, Botryotinia fuckeliana
MTARAPNPASGSRKISFNVSEQYDIQDVVGEGAYGVVCSALHKPSGQKVAIKKITPFDHSMFCLRTLREMKLLRYFNHENIISILDIQKPRNYESFTEVYLIQELMETDMHRVIRTQDLSDDHCQYFIYQTLRALKAMHSANVLHRDLKPSNLLLNANCDLKVCDFGLARSAASQEDNSGFMTEYVATRWYRAPEIMLTFKEYTKAIDVWSVGCILAEMLSGKPLFPGKDYHHQLTLILDVLGTPTMEDYYGIKSRRAREYIRSLPFKKKVPFKTMFPKTSDLALDLLEKLLAFNPVKRITVEEALKHPYLEPYHDPEDEPTANPIPEEFFDFDKNKDNLTKEQLKKLIYDEIMR

SEQ ID NO: 10899 - protein, 89 aa, Glycine max
SRQADNDCIEDEGFRGNGLPRWASHALELVELILRPPEGGPPCLPDHSEQVISALNLLRFILIIDSRGQRSAKLFRKETLHKVHSEWLT

SEQ ID NO: 10900 - protein, 98 aa, Glycine max
  misc_feature (21)..(21): Xaa can be any naturally occurring amino acid
  misc_feature (41)..(41): Xaa can be any naturally occurring amino acid
  misc_feature (76)..(76): Xaa can be any naturally occurring amino acid
  misc_feature (84)..(84): Xaa can be any naturally occurring amino acid
QLPNHTVHTGSDCGAIAHLHXEHGQNFLDMLDGISLFVLLXDTRDPSSIVALDAIYGTFLYIDWGIDGSYWISSEXKGLNDRLXHIAPFTPCHSYSSI

SEQ ID NO: 10901 - protein, 192 aa, Triticum aestivum
  misc_feature (36)..(36): Xaa can be any naturally occurring amino acid
  misc_feature (70)..(70): Xaa can be any naturally occurring amino acid
  misc_feature (148)..(148): Xaa can be any naturally occurring amino acid
RRPTPSVPGSRSNNTLPWSPAVMASSATTGAPFQGXKSTAGLPVGRRSSGSLGSASHGGWIMCMQVWPIXGIKKFETLSYLPPLSTEALLKQVDYLIRSKWVPCLKFNKVAFLFREHNSFPGYYDGRYWTMWKLPMFWCTDTTQVLNXEVEDVKKEYPDSYIRVIRLDNLRQLQCVIFIAFRPSGCEEYDKA

SEQ ID NO: 10902 - protein, 380 aa, Mycobacterium bovis AF2122/97
MSKKHTTLNASIIDTRRPTVAGADRHPGWHALRKIAARITTPLLPDDYLHLANPLWSARELRGRILGVRRETEDSATLFIKPGWGFSFDYQPGQYIGIGLLVDGCWRWRSYSLTSSPAASGSARMVTVTVKAMPEGFLSTHLVAGVKPGTIVRLAAPQGNFVLPDPAPPLILFLTAGSGITPVMSMLRTLVRRNQITDVVHLHSAPTAADVMFGAELAALAADHPGYRLSVRETRAQGRLDLTRIGQQVPDWRERQTWACGPEGVLNQADKVWSSAGASDRLHLERFAVSKTAPAGAGGTVTFARSGKSVAADAATSLMDAGEGAGVQLPFGCRMGICQSCVVDLVEGHVRDLRTGQRHEPGTRVQTCVSAASGDCVLDI

SEQ ID NO: 10903 - protein, 260 aa, Listeria monocytogenes str. 4b H7858
MPRLGFGVWKVQDGDEAVNSVKWAIEAGYISIDTAAAYKNEEGVGQAIKESGVKREDLFVTTKLWNAEQGYESTLAAFDESLRKLELDYVDLYLIHWPVKGKFKDTWRAFEKLYKDKRVRAIGVCNFHEHHLKELMEDAEIAPMVNQIELHPQLTQEPLRKFCAENNIVVEAWSPLGNGKLLSNPEIKAIADAHGKSVAQVILRWDLQIGVVTIPKSVHQERIIQNADIFDFELSEEEVAKISGLNKDERTGPDPDNFNF

SEQ ID NO: 10904 - protein, 414 aa, Triticum aestivum
  misc_feature (40)..(40): Xaa can be any naturally occurring amino acid
  misc_feature (133)..(133): Xaa can be any naturally occurring amino acid
  misc_feature (182)..(182): Xaa can be any naturally occurring amino acid
  misc_feature (236)..(236): Xaa can be any naturally occurring amino acid
  misc_feature (271)..(271): Xaa can be any naturally occurring amino acid
NPTPTTAKKIHRSIDLGARRTATRSDHIQRRKIKPPPPPXMKLQTEAAAAGGEGRLMIRQVWANNVESEFQAIRQVAERFPYVSMDTEFPGVIHCPSKHHATLTPSERYAALKANVDALHLIQVGLAFAASPXAAPAVAFEINLREFDPRVPDPVGAVRGAQGERGRAPPDPGGPGVRARAXPPPAGPLGLVRPGSDRRAPTWVTFHSAYDFGYLVKLLMGRKLPRTLPEFLGLVXRVFFGDQVYDARPAWVTCPSPYGCLGRPGRRSWAXLPPPRSPSLRLVRARSPGTSSAGIRDVYCAGGTSGGLDALAAQLGVKRPAGMSHQAGSDAALTWDVFRRIREVYFAGNSRQGQGQGVGNFAGVLYGLDLELHLAAPADNGNGNGNRNNNKNKCGSGNGAGGRGNNRRAVAALR

SEQ ID NO: 10905 - protein, 244 aa, Brucella melitensis 16M
MRIRGGRNGNSGMDEARKLKIAAAAEALTYVKDGMRLGIGTGSTAEEFVRLLAEKVKGGFRVIGVPTSERTAKLCEELGVALTTLEETPHLDLTIDGADEVDGELSLIKGGGGALLREKIVAAASDSMIVIADQSKVVETLGRFPLPIEVNRFGLGATIRAIEAAAVKCGLAGPLNLRLKDGSPFLTDGGHYIVDASFGRIPDPKTLSDALFAIPGVVEHGLFIELARAAIIAGTDGIRTMNRS

SEQ ID NO: 10906 - protein, 370 aa, Brucella suis 1330
MASRKLLLLPGDGIGPEAMAEVRKVIAFLNSDLNLGFETEEGLVGGCAYDAHGQAISDADMEKALAADAVLFGAVGGPKWDSVPYEVRPEAGLLRLRKDMQLYANLRPAICYPALAHSSSLKPEVIEGLDILILRELTGGVYFGEPKEIIDLGNGQKRGIDTQVYDTYEIERIADVAFELARTRRNKVTSMEKRNVMKSGVLWNQVVTARHKEKHADVQLEHMLADAGGMQLVRWPKQFDVILTDNLFGDLLSDVAAMLTGSLGMLPSASLGAADSKTGKRKALYEPVHGSAPDIAGKGIANPIAMIASLAMCLRYSFGLVAEADRLEAAIAGVLDDGIRTADIWSEGNTKVGTTEMGDAILAKFKALSA

SEQ ID NO: 10907 - protein, 447 aa, Triticum aestivum
  misc_feature (12)..(12): Xaa can be any naturally occurring amino acid
  misc_feature (132)..(132): Xaa can be any naturally occurring amino acid
  misc_feature (434)..(434): Xaa can be any naturally occurring amino acid
MENSGKIVMGRXELGGEIGKGAFGKVHYAKNLESNRGVAIKILDKEKVLKVGLAEQVRREITTMRLVAHKSIVQLHEVMATRSKIYFVMEYMKGGELFDKVSKASKLTEGAAHKNFQQHTSGVALGYRRRVXHRVLKALNLLLLGMAWRKGSAFGLSALSESKSHEGMLHTTCGSPAYVAPEVISKGGYDGAKSDIWSCGVILFVLVAGYLPFQGQNLIEMYRKIEKGDFRCPGWVSQKLQKLLYKIMDPDPNKRISIQKIKESTWFRKGPGENLTVKERLPSENATTDAVPTLGVRRRKNSHEDAKPLAVTNLNAFEIISFSTGFDLSGLFVEKESKKEARFTSEQPASAIVSKLEAVAKTLNLRVRKKDNGVVKMQVRKEGRNGVLQFDSEIFEISPSYHLIEMKQTSGDSLEYQKLLEEGIRPALKDICLXAWHGADGQQEHQG

SEQ ID NO: 10908 - protein, 255 aa, Candida boidinii
MSEINETIGENPQPVEHHEPAPLQHEEQQQQQNHDQDQDQRQQQQNLAQQQQELEEKQKELQIQLEQQQQAGISEDDQELAILKAKMEEMKQEANALREMQEQMGNNGTHPHLDLAARQDIDNRSVYIGNLDYAATPDELQKHFESCGSINRITIPTNKFTGNPKGFAYIEFSDASYVPQALSLNDSLFKGRNLKISAKRTNVPGFSRGRGGPMRGGFRGGRGGFRGRGGFRGGRGGGFRGRGGFRGGRGGFQPY

SEQ ID NO: 10909 - protein, 272 aa, Oryza sativa (indica cultivar-group)
MGRRACCAKEGMKRGAWTSKEDDVLASYIKSHGEGKWREVPQRAGLRRCGKSCRLRWLNYLRPNIKRGNIDDDEEELIVRLHTLLGNRWSLIAGRLPGRTDNEIKNYWNSTLSRKIGTAATAAAGSRGGSTPDTARATDAASSSSVVPPGQQQQPASRADTDTATAAAAAAATTTTVWAPKAVRCTRGFFFHDRETAPLAAAAPAPAGELGDGDDVDCDYYCSGSSSAATTTSSSSLPAVVEPCFSAGDDWMDDVRALASFLDTDDAWNLCA

SEQ ID NO: 10910 - protein, 441 aa, Ralstonia metallidurans CH34
MTHVFHRNPKQTLPVAVGGQGIELIDSNGRRYLDASGGAAVSCLGHGHPRVIEAIKAQVDTIAYAHTSFFTTEVSETLAQTLADAAPGDLDHVYFVSGGSEAVEAALKLARQYFVEIGQTQRRHFIARRQSYHGNTLGALAIGGNAWRREPFLPLLVPAHHVSPCYAYRDQAAGEADTQYAQRLADELEAKILELGPDSVAGFVAETVVGATAGAVPPVADYLKRIRAVCDKYGVLLILDEVMSGMGRTGYLFACEEDGVVPDIVTIAKGLGAGYQPIGAMLSTSRIYDAIIGGSGFFQHGHTYIGHATACAAALAVQRTIVEDKLLDNVLARGEQLRARLRESLGDHPNLGDVRGRGLFVGVEFVADRATKATLDPAKKTHAVLKRTCMEHGVLVYPMGGTVDGIHGDHVLFAPPFICTPTDIDNIVDRFTQAVKTVLPA

SEQ ID NO: 10911 - protein, 252 aa, Zea mays
MYRAKRAALSPKVKRRVGKYELGRTIGEGTFAKVRFAKNTENGEPVAIKILDKEKVKRHRLVEQIKREICIMKLVRHPNVVRLFEVMGSKARIFIVLEYVTGGELFEIIATNGRLKEDEARKYFQQLINAVDYCHSRGVYHRDLKLENLLLDAAGNLKVSDFGLSALTEQVKADGLLHTTCGTPNYVAPEVIEDGGYDGATADIWSCGVILFGLCWNLLLALKCENLLNLVGAKLGSFLSCSHLIDSTIKLF

SEQ ID NO: 10912 - protein, 188 aa, Rickettsia sp. APGEA35
IMLAAVGSLSAFYPDLLNFKEADYELTAIRMIAKIPTIAAMSYKYSIGQPFIYPDNSLDFTENFLHMMFATPCTKYKVNPIIKNALNKIFILHADHEQNASTSTVRIAGSSGANPFACISTGIASLWGPAHGGANEAVINMLKEIGSSEYIPKYIAKAKDKNDPFRLMGFGHRVYKNYDPRAAVLKET

SEQ ID NO: 10913 - protein, 615 aa, Zea mays
MRPRGGPARTRPLPRTAASFSFARRHPIRSSPPLRRSLSPRVVTRPRPPPSLSSFPLLKPPVRQPQWIFAPHLHPLAMAPPPASPADSAPDPRPTASAPVPITVPSPRDHAHHHHLVDRRDTPRGRAWEPERNRRGEAMDGAAAVKLVPGEAGYVLEDVPHVSDYLPDLPTYSNPLQDNPAYSVVKQYFVNPDDTVCQKIVVHKDGPRGNHFRRAGPRQKVYFEPDEVHACIVTCGGLCPGLNTVIREIVCGLSDMYGVTKILGIQGGYRGFYARNTITLTPKSVNDIHKRGGTILGSSRGGHDTVKIVDSIQDRDINQVYVIGGDGTQRGAGVIFEEVRRRGLKVSVAGIPKTIDNDIPVIDKSFGFDTAVEEAQRAINAAHVEAVSAENGIGLVKLMGRHSGFIAHYATLASRDVDCCLIPESPFYLEGEGGLFRYIEKRLKDNGHMVIVVAEGAGQKLIAETMQSIGKDASGNELLLDVGLWLSQKINEHFKKNKMTINLKYIDPTYMIRAIPSNASDNVYCTLLAHSVVHGAMAGYTGFTIGQVNGRHCYIPFYRITEKQNRVSITDRMWARLLSSTNQPSFLCNKVVEEAKKEHERATRLLDGSPSHRKG

SEQ ID NO: 10914 - protein, 396 aa, Triticum aestivum
MALSISAPTSSPFLPAPRQVGRWSSSPSSAKPAVFSLRRPVVVARAAAGNAPSSPAGAVVTELDVVSSFSEIVPDTVVFDDFEKFAPTAATVSSSLLLGIAGLPDTKFKSAIDTALVDGECNTMEKPGDRMSCYLTKALGNVGAELAHQVPGRVSTEIDARLAYDTQGIVQRVHELLQIYNEHDIPSERLLFKIPATWQGIEASRLLESEGTQTHLTFVYSFAQAAAAAQAGASVVQIFVGRIRDWAKNHSGDPEIDEALKKGEDAGLALVKKAYVYIHKNGYKTKLMAAAVRNKQDVFSLLGIDYIIAPLKILQSLDESVTDSDEKYGYVQRLTLSLDKMYNFSQEELVKWDQLSLAAAMGPAAEELLASGLEGYANQARRVEELFAKIWPPPNV

SEQ ID NO: 10915 - protein, 78 aa, Brassica napus
MGFWTLMEGLLLFANALAILNEDRFLAPKGWTLAELHQTGKRNSLKGQIVGLIHACQYMRLPLMLFNLIVIVVKLFSG

SEQ ID NO: 10916 - protein, 152 aa, Glycine max
YSDYQGGKILTGGSVLESGGNFVQPTIVEISPDAPVVKEELFGPVLYVMKFQTLEEAIALNNSVPQGLSSSIFTQRPGTIFKWIGPRGSDCGIVNANIPTNGAEIGGAFGGEKATGGGREAGSDSWKQYMRRSTCTINYGSELPLAQGINFG

SEQ ID NO: 10917 - protein, 533 aa, Glycine max
MGNCCRSPAAVAREDVKSSFSNADHGKRGGGGSASAAAKQKAPITVLAGVPKENIEDRYLVDRELGRGEFGVTYLCIDRDTRELLACKSISKRKLRTAVDVEDVRREVAIMRHLPESPSIVSLREACEDDNAVHLVMELCEGGELFDRIVARGHYTERAAAAVTRTIVEVVQLCHKHGVIHRDLKPENFLFANKKENSPLKAIDFGLSIFFKPGERFSEIVGSPYYMAPEVLKRNYGPEIDIWSAGVILYILLCGVPPFWAESEQGVAQAILRGLIDFKREPWPSISESAKSLVRQMLEPDPKLRLTAKQVLEHPWLQNAKKAPNVPLGDVVKSRLKQFSMMNRFKRKALRVIADFLSNEEVEDIKDMFKKMDNDNDGIVSIEELKAGFRNFGSLLADSEVQLLIEAVDSNGKGTLDYGEFVAVSLHLRRMANDDHLHKAFSYFDKDGNGYIEPDELRNALMEDGADDCTDVANDIFLEVDTDKDGRISYDEFVAMMKTGTDWRKASRHYSRGRFNSLSLKLMKDGSLNLGNE

SEQ ID NO: 10918 - protein, 198 aa, Triticum aestivum
LAGRVDAPRLDRPLLPSPRAPPSPSSSSIPMQQRRGRPSGTDGSDFSYRMVVDSRYQRVADGRSRLARLMLVQTLHQVAGGALLLLSLSKGTEINKFAVLSLAAGLLAILLGEFGRRRTVAVFLPLYTSLSSIAIAFSVTCIIRSDLFVKITKQNTADITSYEMFDVVRVALGILLQLVVITTSTRLLLILSALNGTP

SEQ ID NO: 10919 - protein, 342 aa, Burkholderia sp. NK8
MSSYNIALNFEDGVTRFVECKAGEKVLDAAFRAKINLPMDCSDGVCGTCKCRAESGSYDLGEDYIEDALSDDEKEGGLVLTCQMVPQSDCVIAVPASSTACKTAQSKFAAKVTKVAPHNDAAVVLELDVDAAASAPVFLPGQYVNIDVPGSGQHRSYSFSSAPGETKISFLIKKIPGGVMSTWLESAETGSTVELTGPLGSFYLRAVERPLLFLAGGTGLAPFLSMLEVLARANSQQKIHLIYGVTRDLDLVQVEAIEAYTAKLSNFTFSTVVADADSDHPRKGWVTQHMPAESLNDGDVDVYLCGPPPMVDAVRKHFDDNGVKPNSFHYEKFTPNAAPVTA

SEQ ID NO: 10920 - protein, 453 aa, Dechloromonas aromatica RCB
MSLSSNQDWLARSQAAVWHPCTQMQHHAQTASAAHLPLVPIARGSGAWLYDFDGKRYLDGISSWWTNLFGHANPRINAALKDQLENLEHVMLAGFTHQPVVELSERLSALTGGSLGHAFYASDGASATEIALKMSFHYWRNTGRPEKAEFLCLAGSYHGETVGALAVTDVAIFKDAYAPLVRAATVIPSPDSRLAEAGESPADVARRAAAALEAHLEKHGENIAALIVEPLVQGAAGMVMYDPEYLRLARQLCDRYEVHLICDEIAVGCGRTGTFFAHEQAANDGNPIRPDLMCLSKGISGGYLPLSIVLCSDTIYEAFLDDSVARAFLHSHSYTGNPLACRAALATLNIFESDDILAANRLKSAKISTALAPLADHPQVRHLRQRGMITAFDVETDDPYFSRRFYRATLGREALIRPIGNTVYLMPPYIISDDEIAHLGQSIAGSLQEALAK

SEQ ID NO: 10921 - protein, 489 aa, Magnetospirillum magnetotacticum MS-1
MILKDSSLLKSRAFVNGAWTDADNGATFDVLNPATGEILASVPDMGAAEARRAIEAANAAWPAWKAKTGKERGAILRNWFNLIMAHQEDLAVLLTAEQGKPLAEARGEIAYGASFIEWFAEEAKRVYGDTIPGHAPDKRIVVVKEPIGVVAAITPWNFPNAMITRKCAPALAVGCPVVVKPAEDTPLSALALAELAVRAGIPAGIFNIVTARHGALVGGELSGNPLVRKLSFTGSTQVGKLLMSQCAATVKKVSLELGGNAPFIVFDDADLDAAVAGAMASKYRNAGQTCVCANRMLVQDGVYDEFARRLAKAVSQLKVGDGLASDANQGPLINAKAVEKVERMLADAVSKGATIVCGGKRHALGRTFFEPTIVTNVTSTMSMAREEIFGPVAPLFRFKTEAEAIAMANDTEFGLAAYFYAGNIARVWRVAEKLEYGMVGINDGIISTEVAPFGGVKESGIGREGSKYGIEDFLEIKYLCLGGIKEAAQ

SEQ ID NO: 10922 - protein, 295 aa, Zea mays
  misc_feature (20)..(20): Xaa can be any naturally occurring amino acid
  misc_feature (52)..(52): Xaa can be any naturally occurring amino acid
  misc_feature (90)..(90): Xaa can be any naturally occurring amino acid
  misc_feature (219)..(220): Xaa can be any naturally occurring amino acid
PLWRRTRRSWTREEDKAFEXNAVAAAAAPPADGPPDDGWFTALVASVPARTXEEVRLHYEALVEDVAAIEAGRIPLPRYAGEESSAATPXGSGAAGPSTPKDGGGGSGHRREERKGGVGADAGKSCSKAEQERRKGVPWTEEEHRLFLLGLDKFGKGDWRSISRNFVISRTPTQVASHAQKYFIRLNSMNRDRRRSSIHDITSVTAGEVAAAGAPITGXXARPRRGQMPMGPGGMKHHHPVPPMGMYGHAPMGHPVAGHMVAPAAVGTPVMFPPGHHSPYVLPVGYPAPPTKMHQ

SEQ ID NO: 10923 - protein, 258 aa, Candida albicans SC5314
MSSYTELPQSAPPYSEGESGSPPRQFGDNIPDDFKYSVSVASCELPLRQLFIRKVYSLLTIQLMGSVIMGFIIRSSDSFKIWAMTNTWLLILSFIGSIGFMIGAFFKARSYPINLILLGGFTICESYTLGVACAFIESSILIEAILLTLIIFIGLTIFAFQTKYDFISWQGTVGMMLWGLIGWGFVMMFIPHQQNSMMENVYSFLGALIFSIYIIIDTQQIMKTLHLDDEIIGCISLYLDIINLFLFILRILNNNRDD

SEQ ID NO: 10924 - protein, 376 aa, Zea mays
  misc_feature (91)..(91): Xaa can be any naturally occurring amino acid
  misc_feature (112)..(112): Xaa can be any naturally occurring amino acid
  misc_feature (128)..(128): Xaa can be any naturally occurring amino acid
  misc_feature (153)..(153): Xaa can be any naturally occurring amino acid
  misc_feature (170)..(170): Xaa can be any naturally occurring amino acid
  misc_feature (190)..(190): Xaa can be any naturally occurring amino acid
  misc_feature (207)..(207): Xaa can be any naturally occurring amino acid
  misc_feature (235)..(235): Xaa can be any naturally occurring amino acid
  misc_feature (251)..(251): Xaa can be any naturally occurring amino acid
  misc_feature (270)..(270): Xaa can be any naturally occurring amino acid
  misc_feature (286)..(286): Xaa can be any naturally occurring amino acid
  misc_feature (350)..(350): Xaa can be any naturally occurring amino acid
MGSTAGDVAAVVDEEACMYAMQLASSSILPMTLKNAIELGLLEVLQKEAGGGKAALAPEEVVARMPAAPSDPAAAAAMVDRMLRLLASYDXVVRCQMEDRDGRYERRYSAAXVCKWLTPNEDGVSMGXALALMNQDKVLMESWYYLKDAVLDXGGIPFNKAYGMTAFEYXHGRTRRFNRVFNEGMKNHSXVIITKKLLDFYTGFEGXVSTLVDVGRPAWGATLHAITSRHPHISXGVNFDLPHVISEAPPXFPGVRHVGGDMFASVPAGXDAILMKWILHDWSDAXHCATLLKNCYDALPENGKVIVVECVLPVNTEATPKAQGVFHVDMIMLAHNPGGKERYEREFREXLPRGAGFSGFKATYIYANAWAIEFIK

SEQ ID NO: 10925 - protein, 367 aa, Saccharomyces cerevisiae
MHINVRGTRKIISNVSSFTPRYEFPKYSMPLTDFKGHQVKALKTFEKLLPQMNMIIELRDIRAPLSTRNVVFDRIARKEHDVMKLVVYTRKDLMPGNKPYIGKLKNWHEELGEKFILLDCRNKTDVRNLLKILEWQNYELETNGGYLPMGYRALITGMPNVGKSTLINSLRTIFHNQVNMGRKFKKVAKTGAEAGVTRATSEVIRVTSRNTESRNEIYLIDTPGIGVPGRVSDHNRMLGLALCGSVKNNLVDPIFQADYLLYLMNLQNLNDGRTELYPGSTNSPTNDIYDVLRRLQVNKSQNEKSTAIEWTNKWRLHGKGIIFDPEVLLNNDEFSYKNYVNDQLEKLGDLSYEGLSNKLKGNPNQVF

SEQ ID NO: 10926 - protein, 364 aa, Glycine max
MGKGGMSIDEHGEGKEENMAAWLVGMNTLKIQPFKLPTLGPHDVRVRMKAVGICGSDVHYLKTLRCAHFIVKEPMVIGHECAGIIEEVGSQVKSLVPGDRVAIEPGISCWHCNHCKHGRYNLCDDMKFFATPPVHGSLANQIVHPADLCFKLPDNVSLEEGAMCEPLSVGVHACRRANIGPETNVLIMGAGPIGLVTMLAARAFGAPKTVIVDVDDHRLSVAKSLGADDIIKVSTNIKDVAEEVVQIQKVMGAGIDVTFDCAGFDKTMSTALSATQPGGKVCLVGMGHSEMTVPLTPAAAREVDVVGVFRYMNTWPLCLEFLRSGKIDVKPLITHRFGFSQKEVEEAFETSARGGNAIKVMFNL

SEQ ID NO: 10927 - protein, 349 aa, Methanosarcina mazei Go1
MENGMHHNVFTNTPTIPIDVKDRSVSELMDGMLRTGFQGRKLAESVQAWSNMLKEKDTTVLMGLSGAMVPAGMRRVISYLIRERMIDCLVSTGANLFHDSHEALGRKHYVGSHLANDEKLFEHGVDRIYDVFAVEEEFRNADNLIADFAEEIGEISCSSREFMYLLGKELVRRGAAEDSIVVSAYRHNVPIFVPALSDSSIGIGLTIARRRGLKLEIDQIKDVDEITQIVEKSGHTGVVYVGGGVPKNFIQQTEVIASILGMDVPGHEYAIQYTSDSPHWGGLSGCTFDEAVSWGKVAAQAKKVQVFVDATIALPIVAHALHEKTRGVKRTAPVFSWDGPEGLEIAYNE

SEQ ID NO: 10928 - protein, 543 aa, Glycine max
  misc_feature (123)..(123): Xaa can be any naturally occurring amino acid
MVSPISHLVTLILLLSVSLAASASLEENFVQCLSFYSDKAAPFYASIYTPQNASFNKILESSAQNLRYLVPSAPKPELIFTPLTDSHVQVAVTCSKKLGIHLRIRSGGHDYEGLSYVSEVESXFIIVDLSKLRAVDVDIEDNTAWIQAGATIGEVYYKIYEKSSVHGFPAGLCTSLGVGGHITGGAYRPMMRKYGLGADNVVDARIVDANGQILDREAMGEDLFWAIRGGGGASFGILLWWKIKLVPVPETVTVFTVTRSLEQDATKILHRWQEVAPYIDEDLFIRVIIQPATVGNKTERTITTSYNAQFLGGADRLLQVMKESFPELGLTKKDCLETSWIKSVLYIAGYPNDTPPEVLLQGKSTFKNYFKAKSDFVRDPIPETGLEGLWQRLLEEDSPLMIWNPYGGMMSKVSESDIPFPHRNGTLYKIQYLTLWQDGDKNASKHEDWIRKLYNYMTPYVSKFPREAYVNYRDLDLGMNKKNSTSYIQATAWGNMYFKDNFNRLVKIKTKVDPDNVFRHEQSIPPLPVSSMRLKDKKCKTWE

SEQ ID NO: 10929 - protein, 509 aa, Gibberella zeae PH-1
MTFPSDIHTFHSGRPQPESSSKSNTFVSVDPSNAKPLATIYTTTSEQLNQTVAAAQAAFPAWSQTPAPRRAAILLKAASILRERNDELALTETLDTGKPWSETSTVDVVTGADVLEYYAHMAAGSFPGQNTRLRPDAFVLTTHEPLGVCAGIGAWNYPIQIALWKSAPCLAAGNCMVYKPSEVTPLHAETLAQIYIEAGVPPGVFNVVYGDGIAVGAPLVAHSGIAKVSFTGQVSTGSKVASQAVTDMKGVTMELGGKSPLVILPDADVEDAADTAMVANFFSTGQVCTNGTRVFVPDTLLSQVEEAIVQRCREGIRMGLPRKTETNFGPMVSAAQQEKVKMYIQHGRTVDKAKVLFNGSQEASMPQPTSDGFWVHPVVFTNCTDDMRVTREEIFGPVMCIMPYKTQGRPRQEWLSDLIARANDTPMGLAAGVVSSDVGLAQEVVQKLDAGITWINTWGESPAEMPVGGWKMSGIGLENGHEGISAYMRTKSTLIQLGRGACKGVFSKL

SEQ ID NO: 10930 - protein, 303 aa, Gibberella zeae PH-1
MADQHEVDLDSIIDRLLEVRGSRPGKQVQLLEAEIRYLCTKAREIFISQPILLELEAPIKICGDIHGQYYDLLRLFEYGGFPPEANYLFLGDYVDRGKQSLETICLLLAYKIKYPENFFILRGNHECASINRIYGFYDECKRRYNIKLWKTFTDCFNCLPIAAIIDEKIFTMHGGLSPDLNSMEQIRRVMRPTDIPDCGLLCDLLWSDPDKDITGWSENDRGVSFTFGPDVVSRFLQKHDMDLICRAHQVVEDGYEFFSKRQLVTLFSAPNYCGEFDNAGAMMSVDESLLMAAKTRQSIPSPR

SEQ ID NO: 10931 - protein, 462 aa, Listeria monocytogenes EGD-e
MFKTNVEQNNVPVFGSFESGQDLPEKRMNKESVDPRIAYQLVKDQLIDEGSARQNLATFCQTYMEPEAEQIMAETMEKNAIDKSEYPQTAKLESSCVNMLADLWNVDESEHYMGTSTVGSSEACMLGGMAMKFRWRSAALKNGLDIHAKKPSLVISSGYQVCWEKFCVYWDIELREVPMSEEHLSINTDIIMDYVDEYTIGIVGILGITYTGKFDDIMTLNDLVEDYNNTHDNEVVIHVDGASGAMFTPFVEPGLEWDFRLPNVVSINTSGHKYGLVYPGVGWILWRDKEYLPEELVFDVSYLGGHMPTMAINFSRSASQIIGQYYNFLRFGYEGYRQIHMRTRDGALQLSQAVAETGLFEIYNDGANLPIVCYKLKDDANVAWTLYDLADRLQMKGWQVPAYPLPKEMGNTIIQRYVCRGDLGQNMVTAFKNDLSESIEELNNAHILYHDVNTSKTHGFTH

SEQ ID NO: 10932 - protein, 509 aa, Zea mays
  misc_feature (162)..(162): Xaa can be any naturally occurring amino acid
  misc_feature (188)..(188): Xaa can be any naturally occurring amino acid
  misc_feature (366)..(366): Xaa can be any naturally occurring amino acid
  misc_feature (377)..(377): Xaa can be any naturally occurring amino acid
  misc_feature (430)..(430): Xaa can be any naturally occurring amino acid
  misc_feature (469)..(469): Xaa can be any naturally occurring amino acid
MATANGSSKGSFEVPKVEVRFTKLFIDGKFVDAVSGKTFETRDPRTGEVIASIAEGDKADVDLAVKAAREAFDNGPWPRMTGYERGRILHRFADLIDGHVEELAALDTVDAGKLFAVGKARDIPGAAHLLRYYAGAADKVHGATLKMAQRMHGYTLKEPVGXVVGHIVPWNYPTTMFFFKVGPALAGXGAPVVVKPAEQTPLSALFYAHLAREAGVPAGVLNVVPGFGPTAGAAVAAHMDVDKVSFTGSTEVGRLVMRAAAESNLKPVSLELGGKSPVIVFDDADLDMAVNLVNFATYTNKGEICVAGTRIYVQEGIYDEFVKKAAELASKSVVGDPFNPSVSQGPQVDKDQYEKVLRYIDIGKRXEGATLVTGGKXPCGDNKGYYIEPTIFTDVKDDMTIAQDEIFGPVMALMKFKTVEEVIQKANNTXRYGLAAGIVTKNIDVANTVSRSIRAGAIWINCYFAFDPXDAPFGGYKMSGFGKDMGMDALDKYLQTKTVVTPLYNTPWL

SEQ ID NO: 10933 - protein, 214 aa, Arabidopsis thaliana
MMSELDLGTSQRMTETHRTTTTFLDLLRRQMSGHDLTRRKRTLKERLRFKCIGCCGPTWNLRLTNNTTLHSPTSRDDEIEELQIETGLVLESDHGSGTGMNLATALEAERYNRGESTEAEADMTPRRVSLMRLLEETAEKIVDDDGKETEILTASIGTLTGNDSVCCVCMGRKKGAAFIPCGHTFCRVCSRELWLNRGSCPLCNRPIIEILDIF

SEQ ID NO: 10934 - protein, 589 aa, Glycine max
MSSASLKEMRNGGEDYSNGHGGGGVRDLYGEDCATEDQLITPWTFSVASGCSLLRDPRYNKGLAFTEGERDAHYLRGLLPPAIFNQELQEKRLMHNLRQYEVPLHRYMAMMDLQERNERLFYKLLINNVEELLPVVYTPTVGEACQKYGSIFRRPQGLYISLKEKGKILEVLKNWPEKSIQVIVVTDGERILGLGDLGCQGMGIPVGKLSLYTALGGVRPSSCLPITIDVGTNNEKLLNDEFYIGLKQKRATGQEYAELLEEFMHAVKQNYGEKVLIQFEDFANHNAFDLLEKYSSSHLVFNDDIQGTASVVLAGLLASLKLVGGTLVDHTFLFLGAGEAGTGIAELIALEISKQTKAPVEETRKKIWLVDSKGLIVSSRLESLQQFKKPWAHEHEPVKSLLDAVKAIKPTVLIGSSGAGKTFTKEVVETMASLNEKPLILALSNPTSQSECTAEEAYTWSKGKAIFASGSPFDPVEYEGKLFVPGQANNAYIFPGFGLGLIISGAIRVRDEMLLAASEALAAQVSQENYDKGLIYPPFSNIRKISAHIAAKVAAKAYDLGLASHLPRPKDLVKYAESCMYSPGYRSYR

SEQ ID NO: 10935 - protein, 360 aa, Lolium perenne
MGSTAADMAASADEDACMFALQLASSSVLPMTLKNAIELGLLEILVAAGGKSLTPTEVAAKLPSAANPEAPDMVDRILRLLASYNVVTCLVEEGKDGRLSRSYGAAPVCKFLTPNEDGVSMAALALMNQDKVLMESWYYLKDAVLDGGIPFNKAYGMSAFEYHGTDPRFNRVFNEGMKNHSIIITKKLLELYHGFEGLGTLVDVGGGVGATVAAIAAHYPTIKGVNFDLPHVISEAPQFPGVTHVGGDMFKEVPSGDTILMKWILHDWSDQHCATLLKNCYDALPAHGKVVLVQCILPVNPEANPSSQGVFHVDMIMLAHNPGGRERYEREFQALARGAGFTGVKSTYIYANAWAIEFTK

SEQ ID NO: 10936 - protein, 351 aa, Lolium perenne
MADEEACMFALQLANSAVLPMAIRTSIELGLLETLVGAGGKLLTPEEAVKKLPSKAKHPDAASMIDRMLRVLASYKVVTCEVEEGKDGSLSRRYGATPVCRWLAPNEDGASMAPFALLTQDRVFMEAWCHMKDAILEGGSAFHRAFGTSWFEYAGQDARFNRLFNEAMEHHSVILTKKLLELYKGFDGIGTLVDVAGGVGAVIHAITSKYPSIKGINFDLPHVIADAPPYPGVEHVSGDMFKKMPSGDAILMKWILNCFSDDECATLLKNCYDALPAHAKVINVECILPVNPDATNGAQALIAVDLSLLVYSPGGKERYHRDLEKLAKGAGFTSVTATYIFADFWAMEYTK

SEQ ID NO: 10937 - protein, 95 aa, Glycine max
TDRPVGPWLKVKNPEHWAKRSSLKDVIADAFLQQILLRPAEYDVIACMNLNGDYISDALAAQVGGIGIAPGANIGDECALFEATHGTAPKYAGQD

SEQ ID NO: 10938 - protein, 361 aa, Lolium perenne
MGSTAAEIAASADEEACLYALQLGSSSILPMTLKNTIELGLLETLMAAGGKSLTPTEVAAKLPCAAKNPEAPDMVDRMLRLLASYNVVSCLVEEGTDGRLSRRYGAAPVCKFLTPNEDGVSMAALALMNQDKVLMESWYYLKDAVLDGGIPFNKAYGMSAFEYHGTDPRFNRVFNEAMKNNSIIITKKLLQLYDGFQGLGTLVDVGGGVGATVAAITAHYPTIKGINFDLPHVISEAPPFPGVTHVGGDMFKKVPLGDAILMKWILHDWSDQHCGTLLKNCYDALPMHGKVVLVECILPVNPEAKPSSQGVFHVDMIMLAHNPGGRERYEREYEALARGAGFAGFKSTYIYANAWAIEFTK

SEQ ID NO: 10939 - protein, 207 aa, Zea mays
MAMPDLTATVIQISGPRGELPVLGAGRRRCVWQFNFREFDDARDIFASDSIELLRRSGIDLRLNAERGVDARRFAELLMSSGVVLNDSVYWVTFHAGYDFGYLLKILTCNCLPDTQAGFFKLMKIYFPTVYDIKHLMKFCNSLHGGLNKLAELLDVERVGESHQAGSDSLVTSCAFWKLKDSFFTGSTEKYAGVLYGLNAEIDVSAH

SEQ ID NO: 10940 - protein, 386 aa, Parachlamydia sp. UWE25
MSEVLFEITKESLETGLRGYPVGYCTTSSVDPVKGLFYAGHPVSEIDQWEPEQVIYLLYHGYVGKPEEVSRFSQDLLIRANCSTALIESIEKLPRNIHPMKLFSIALLLASGFEGKNDYHEDYLNLIAKVPEIAATVINHHAGWGKTKQSQPQLGYMENFTQMLNVPDANQQELARAFKFFNVLHYDHGGGNLSAFVGKAVASGLEDLYGSMSAAMCALAGPRHGKANQDCLTFVHQLVEELGEHSTEEELERLIRAHLDKGELIFGFGHAVLRVEDPRATLLYEVTNQYYASHALVKMAQLLRKVGSKVLQNNPKISDPYPNVDAISGILLTAAGFPCSEYYTVLFGLARVVGIGRQIVYERKEAREGKGTPIVRPKYFFKENKQ

SEQ ID NO: 10941 - protein, 459 aa, Glycine max
  misc_feature (122)..(122): Xaa can be any naturally occurring amino acid
  misc_feature (149)..(149): Xaa can be any naturally occurring amino acid
MDRRTGSTRNILFNKYEIGKLLGQGNFAKVYHGRNLSTNESVAIKVIKKERLQQKERLVKQIKREVSVMSLVRHPHIVELKEVMANKAKIFMVVEYVKGGELFAKVAKGKMKEDVARKYFQXQLISAVDFCHSRGVTHRDLKPENLLLXDENEDLKVSDFGLSALPDQRRSDGMLLTPCGTPAYVAPEVLKKKGYDGSKADIWSCGVILFALLSGYLPFQGENVMRIYSKSFKADYAFPEWISPAAKNLISNLLVVDPQKRYSIPDIMKDPWFQIGFLRPIAFSMKESALEDNIDFSGDDVPSPGSDDGNSSSNNEDGELTGAKPARPSYNAFEIISSLSHGFDLRNLFETRKRSPSMFISKFSASAVMAKLEGVAKKLNFRVTGKKEFVVRMQGATEGRKGKLAMTVEVFEVAPEVAVVEFAKSAGDTLEYIKFCEDQVRPSLKDIVWSWQGDANCHQ

SEQ ID NO: 10942 - protein, 178 aa, Oryza sativa (japonica cultivar-group)
MYLLSPRNGDEEDEQEEIQELISDDEPPNLKLASCATAASSSSSSGSDMEKGRGKACGGGSTAPPPPPPSSSGKSGGGGGSNIREAAASGGGGGVWGKYFSVESLLLLVCVTASLVILPLVLPPLPPPPSMLMLVPVAMLVLLLALAFMPTTTSSSSSAGGGGGGGRNGATTGHAPYL

SEQ ID NO: 10943 - protein, 256 aa, Glycine max
  misc_feature (186)..(186): Xaa can be any naturally occurring amino acid
CSQLQSYWLQVAVCRQFKPVTLELGGKSPFIVCKDADVDAAVEASHFALFFNQGQCCCAGSRTFVHESIYGEFVEKAKARALKRVVGDPFKNGVEQGPQIDSVQFEKIMKYIRSGVESGAQLESGGQRIGSKGYYIQPTVFSNVQDNMLIAKDEIFGPVQSILKFKDLEEVIRRANATSYGLAAGXFTKNMDTANTLMRALQAGTVWINCYDVFDAAIPFGGYKMSGQGRVRGIYSLRSYLQVKAVVTALKNPAWL

SEQ ID NO: 10944 - protein, 116 aa, Hevea brasiliensis
MAALKMVSFLVLCMLVAAPMTAQAITCGQVQSALVPCLSYLKTTGPTPPATCCNGVRTINNAAKTTADRRTACQCLKSAAGSVKGLNPTTVAGLPGKCGVNIPYKISLSTNCATVK

SEQ ID NO: 10945 - protein, 180 aa, Medicago sativa
MALISSAAVTTVNRASSAQANLVAPFTGLKSSAGFPVTKKTNNDITSIASNGGRVNCMQVWPPVGKKKFETLSYLPPLTEEQLAKEVEYLIRKGWIPCLEFELEKGFVYRENHRSPGYYDGRYWTMWRLPLFGATDSSQVLKELADCKAEYPDSFIRIIGFDNVRQVQCISFIAHTPKNY

SEQ ID NO: 10946 - protein, 357 aa, Agrobacterium tumefaciens str. C58
MRALRFHAAKDLRIEDIAEPKRPGPGQVLVRNRFVGICGTDLHEYSYGPIFIPTEPHPFTGAHGPQILGHEFGGVVEAIGDGVTSVNVGDRVSIQPLIMPRSGDYFADRGLFHLSTQLALVGLSWDGGGMAEAALVNEYNVQKIPDEMTDEEAALVEPSAVAVYACDRGGVTAGNSVLVTGAGPIGMLTLLAARAAGATQLFVSDLNDARLELARNVIRDVITINPKRDNVGDVVRSATEGKVGCDVAIECVGNEHALKACVDAVRKQGVVVQTGLHPHENPIDWFQVTFRDLEIKGSWAYPTHYWPRVIRLIASGLLPATKIVTKRITLDTAVTEGFDALLDPAGTHLKILIDLSK

SEQ ID NO: 10947 - protein, 395 aa, Zea mays
MEVAMVVSARASLLILVLSLCSPYKFIQSPMDLGPLNLLPTTSTAAASSDFGRILFRAPAAVLRPQSPRDISMLLSFLSGSPSLSRVTVAARGAGHSIHGQAQAPDGIVVETRSLPGEMEFHHVRGGGEGRASYADVGGGVLWIELLERSLKLGLAPRSWTDYLYLTVGGTLSNAGISGQTFKHGPQISNVLQLEVVTGLGQFGIITRARILLQEAPEKVTWVRAFYDDLGAFTRDQELLVSIPDSVDYVEGFMVLNERSLHSSSIAFPASVDFSPDFGTRSSPRIYYCVEFAVHHHHGYQKQSQAAVEAISRRMSHMASQLYSVEVSYLDFLNRVRMEEVSLRSAGMWEEVHHPWLNMFVPKPGVAGFRDLLMDNVSPDSFQGLILIYPLLRDK

SEQ ID NO: 10948 - protein, 176 aa, Neurospora crassa
MGYYDDDAHGHVEADAAPRATTGTGTGSASQTVTIPCHHIRLGDILILQGRPCQVIRISTSAATGQHRYLGVDLFTKQLHEESSFVSNPAPSVVVQTMLGPVFKQYRVLDMQDGSIVAMTETGDVKQNLPVIDQSSLWNRLQKAFESGRGSVRVLVVSDHGREMAVDMKVVHGSRL

SEQ ID NO: 10949 - protein, 97 aa, Zea mays
MDEEEHEVYGQEIPEDGDMDGADVDMAASGDDAAKLQELDEMKRRLKEMEEEAAALRDMQAKVAKEIGEIEPTNHGTAWQPCPAPPTAPACPFPCVT

SEQ ID NO: 10950 - protein, 207 aa, Methanococcoides burtonii DSM 6242
MAFQIVFAAIALAILTSGVAERIKLSSFIVFGLLWTTLVYDPLAYWAWGDGWVGSMGALDFAGGTVVHISSGFGALALSFVIGKRIGFGKYSMEPENITTTLLGGALLWFGWFAFNAGNALAANAFVVTLISASSGALTWMGASWIKGKSSSLGMNSGAIAGLVAITPACGFVGPLAAIIIGGSAGILCYGTLLFCIYKKFDESLDA

SEQ ID NO: 10951 - protein, 354 aa, Oryza sativa (japonica cultivar-group)
MTPAADGDDDETTCIRALELIFTFVVPMTLKATIKLGLLDALTGGGHALTADELAAAAQLPAEAASSVDRMLRLLASLDVVKCAPTDTGGEAAVRRYTPAPVCRWFAGERSLAPLAMFLLDDDYLSTWNQLPAAVAGGDGQVAFEKARGMPMFEYMGTNRRLNTLFNQAMVQQSTVVIGKLLERFQGFDGVSVLVDVGGGTGATLEMITSRYKNITGVNFDLPHVIAQAPSLPGVKHIAGNMFESVPNGDAIFLKSMLHLHNDEDCIKILKKCHQALTHNGKVIAVEILLPAIPEPVPTAQNPFRMDMIMLNNHWGGKERTEPEFAKLAVECGYTGVFQATYIFANYWALEFSK

SEQ ID NO: 10952 - protein, 406 aa, Azospirillum brasilense
GFAGDAAARYSSTLGVAAVTYGAGAFNMVNAVAGAYAEKSPIVVISGAPGTTEGNAGLLLDHQGRTLHTQFQVFKEITVAQARLDDPAKAPAEIARVLGAARALSRPVYLEIPRNMANAEVEPVGDDPAWPVDRDALAPAPDEVLAAMRSATSPVLMVCVEVRRYGLEAKVADVAHGLGVRSVTTFMGRGLLADAPTPPLGTYIGVAGDAEITRLVEESDGLFLLGAILSDTNFAVSQRKIDLRKTIHAFDRAVTLGYHTYADIPLDGLVDALLERLPPSDRTTRGKEPHAYPTGLQADDGPIAPMDIARAVNDRVRAGQEPLLIAADMGDCLFTAMDMIDAGLMAPGYYAGMGFGVPAGIGAQCVSGGKRILTVVGDGAFQMTGWELGNCRRLGIDPIVILFNNA

SEQ ID NO: 10953 - protein, 308 aa, Triticum aestivum
NIQVDPSGQVQWLQQQLVPQLQQPLSQQPQQTFPQPQQTFPHQPQQQVPQPQQPQQPFLQPQQPFPQQPQQPFPQTQQPQQPFPQQPQQPFPQTQQPQQPFPQQPQQPFPQTQQPQQPFPQLQQPQQPFPQPQQQLPQPQQPQQSFPQQQRPFIQPSLQQQLNPCKNILLQQCKPASLVSSLWSIIWPQSDCQVMRQQCCQQLAQIPQQLQCAAIHSVVHSIIMQQQQQQQQQQGMHIFLPLSQQQQVGQGSLVQGQGIIQPQQPAQLEAIRSLVLQTLPSMCNVYVPPECSIMRAPFASIVAGIGGQ

SEQ ID NO: 10954 - protein, 228 aa, Pisum sativum
PVYISISCNLAGIPHPTFSREPVPFSLSPKSSNQMGLEAAVEAAAEFLNKAVKPVLVAGPKLRVAKASEAFTELADKSAYPYAVMPSAKGLVPENHQHFVGTFWGAVSTSFCAEIVESADAYLFAGPIFNDYSSVGYSLLLKKEKSIIVEPNRVVIGNGVAFGCILMKDFLSALAKRIKRNNTAYENYHRILVPEGVPVESEPREPLRVNVLFQHIQNMLSSKTAVIA

SEQ ID NO: 10955 - protein, 400 aa, Zea mays
  misc_feature (370)..(370): Xaa can be any naturally occurring amino acid
  misc_feature (385)..(385): Xaa can be any naturally occurring amino acid
ACLQAVIKRLMTDVPFGVLLSGGLDSSLVASVTKRHLVKTDAAGKFGTELHSFVVGLENRARDGTLTFFFTSLSTTDRPARTFQGSPDLKAAREVADYLGTTHHEFHFTDGIDAIEEVIYHDETYDVTTIRASTPMFLMARKIKSLGVKMVLSGEGSDELLGGYLYFHFAPNKEEFHRETCRKVKALHQYDCLRANKATSAWGLEVRVPFLDKEFINVAMGMDPEWKMYDKNLGRIEKWVMRKAFDDDEHPYLPKHILYRQKEQFSDGVGYNWIDGLKSFTEQQVTDEMMNNAAQMFPYNTPVNKEAYYYRMIFERLFPQDSARETVPWGPSIACSTPAAIEWVEQWKASNDPSGRFISSHDSAATDHTXAVSRRWPTAAATAPXNGTVNGKDVAVAIAV

SEQ ID NO: 10956 - protein, 177 aa, Triticum aestivum
  misc_feature (12)..(12): Xaa can be any naturally occurring amino acid
  misc_feature (64)..(64): Xaa can be any naturally occurring amino acid
  misc_feature (96)..(96): Xaa can be any naturally occurring amino acid
  misc_feature (162)..(162): Xaa can be any naturally occurring amino acid
MGPPVMASLATXRGRFQGCKSSAALPVSARSNGASLGGVSNGGRIRCMQVWPIEGIKKFETLSXYLPPLSTEALLKQVDYLIRSKWVPCLEFSKVXGFIFREHNTSPGYYDGRYWTMWKLPMFGCTDATQVINEVEEVKKEYPDAYVRIIGFDNMRQVQCVXLIAFTPPPSEESGKA

SEQ ID NO: 10957 - protein, 295 aa, Candida albicans SC5314
MPAQLQVNTDYFTLNNGNKIPAVGLGTWQATNEDEAYRAVLAALKNGYKHIDTAAIYGNEEQVGKAIKDSGVPREELFVTTKLWNADHKNIEEALETSLKKLGLNYVDLYLIHWPASIDKSTNKPYTDFDYVDTYRGLQKVYKNSKKIRAIGVSNFTKKKLERLLSSEGVDVVPAVNQIEAHPLLTQPELYDYLKEKGIVLEAYSPLGSTNSPLFKNETIVKIAEKNGVEPAQVLVSWAIQRKTVVLPKSVTESRVISNLKTFTLPSEDFETLNKLSEKDGVVRTCNPAFNNFDD

SEQ ID NO: 10958 - protein, 289 aa, Candida albicans SC5314
MSAQLKTNNDRIALNNGNKIPVIGLGTWESNKDAFLTALKLGYRHIDTATIYKNEEQVGQAIKESGIPREELFITTKVWNNDHKNVEQALETSLKKLGLDYVDLYLVHWPVSIDKTTKEPYPDYDYVDTYKELQKIYKTTTKIKSIGVSNFTKSQLERLLSADGVDVVPAVNQVEAHPLLPQPELYEYLKEKGITLEAYSPLGTSSSPLIKNKTIVEIADKNGVDPAQVLISWAVQRKTVVLPKSVTESRLVSNLKTFELSAEDFDTLNKLSEKEGITRIINPFKNFQD

SEQ ID NO: 10959 - protein, 354 aa, Gibberella zeae PH-1
MSLPSTMKAVVFDGLYKISVQDRPVPQIRDGRDIIIKVHAAGLCGSELHIYRGHQPSGTGFIMGHEFTGTVVQVGSDVKTIHIGDKVVAPFTASCGNCFFCNNGCSARCVESQLFGCEILNGGQAEYVRIPMADGTAVKAPETISDEALLLMADIFPTGFYGVKSAMELVPSQNIQEATMVVVGCGPVGLCAILAATHFKPRHLFAIDSVESRLEQARKLGAEPLNFETDRAGLEARIREVTEGRGADMVVEVVGQAPALRTAFDIVRPFGAISSIGVHNKEIPWTGDDAYTRNIRVQMGRCPVRSVFNEALHLLEQKQDKIGFLFDHKMPLAQAPEGYTLFEQRKTQKVVFTL

SEQ ID NO: 10960 - protein, 506 aa, Lithospermum erythrorhizon
MALPAIPLAIIIFLIISYKLYQKLRLKLPPGPRPLPIIGNIYQVKPVKFRCFYNWSKTYGPIFSIYYGSQMNVIVSTTELAKEVLKENDQHLADRFRTRSSASMSRGGKDLIWADYGPHYVKVRKLCNVELFSPKRLEAIRPMREDEYTALVESIYKDCTKPELKGKSLLVREYLSSVAFNNITRLAFGKRFMDSNGVVNEQGQEFKKITHDGIKITAKLSIAEYIPWIRWMFKVEQDALDKFAADRDHLTRVIMEEHIKSGNTKQHFVDALLTLQKQYDISEDTIIGLLWDMIAAGMDTATISTEWAMAELVRNPRVQRKAQEELDRVVGPDRIMTEADVPKLPYLQCIVKESLRLHPPTPLMLPHRASANVKIGGYDIPKGSIVHVNVWAIARDPAYWKNPEEFRPERFMEEDIDMKGTDYRLLPFGAGRRICPGAQLAINLITSSLGHLLHQFTWSPQPGVKPEEIDLSENPGTVTYMRNPVKAVVSPRLSAVHLYKRVESDM

SEQ ID NO: 10961 - protein, 449 aa, Xylella fastidiosa Dixon
MNPTLIVNARLVNEGREFDSDLRIENGRIARIDTGLSAQSKDIVIDAAGRRLLPGMIDDQVHFREPGLTHKGDIASESAAAVAGGLTSFMDMPNTNPPTLGAAALQAKYDAARGRAWGNYGFYLGASNDNLAAIQALDPKTSPGIKVFMGASTGNMLVDNETTLEGIFRHAPTPIITHCEDTPTINATLAKYHSRYGNTLSAEQHPDIRSRQACLKSSQLAVSLAKKNGTRLHVLHISTADELRLFEAGPLVDAAGKRRKQITAETCIHFLHFDRMDYARLGNLIKCNPAIKEASDREALIAALAKDVIDVLATDHAPHTWEEKQQPYAQAPSGLPLVQYALVAALELVHAGRLSVTEIVRKFAHAPAQLFDVTERGFLREGYWADLVLVEDTPFTVKRQEILSKCGWSPFEGATFRSRIASTWVNGNHVWDGNRLVGVPNGQRLEFDR

SEQ ID NO: 10962 - protein, 695 aa, Glycine max
  misc_feature (13)..(13): Xaa can be any naturally occurring amino acid
  misc_feature (28)..(28): Xaa can be any naturally occurring amino acid
  misc_feature (36)..(36): Xaa can be any naturally occurring amino acid
MPVLACCVDACSXPPGYAFAGDISFPAXPIAFTGVXPPATADDTNNSNNHWSPSLSAALYNVDGWGGPYFAVNTAGNISVRPHGSDTVSHQEIDLLKIVKKASDPKSLGGLSLQLPLIARFPDVLKNRLESLQSAFDYAIQSGGYESHYQGVYPVKCNQDRFVVEDIVKFGSPFRFGLEAGSKPELLLAMSCLCKGNPDGLLICNGFKDAEYISLALVANKLALNTVIVVEQEEEVDLIVELSKKLCIKPVIGLRAKLRTKHSGHFGGIFRRRGKFGLTTARVLRVVKNLDLAGMLDCLQLLHFHIGSQIPSTALLADGVGEAAQIYCELVRLGANMRVIDIGGGLGIDYDGSKSCDSDISVEYGLEEYAAAVVHAVQCVCDRSVKHPVICSESGRAIVSHHSVLIFEAVGTSSTNGGGAPPALSAHYLAEELSEDYGYLSELAFRGDYETCLVYTEEMKERCVEQFKQGTVCMEQLAAVEGLCELVRKAVGAAESVRRYHVNLSIFTSVPDAWGIEQVFPIIPIHRLDEKPSVRGILSDLTCDSDGKIDKFINGESSLPLHEMEGGRTYYLGMFLGGAYEEALGGVHNLFGGPSVVRVSQSDGPHSFAVTRAVPGPSCGDVLRVMQHQPELMFETLKHRAQEYVSHDNAAALLAAGLARTFDRMPYLLSLSSFVADDVAAAVPAAQDLGEQWSY

SEQ ID NO: 10963 - protein, 114 aa, Brassica napus
MAIKNSFSLLLSSLMVFALIAIPTISGQPSGTWCVANPKIQDPVVQAALGWACQQSEAYCSRIQLGQNCYSPNTLRDHASVVFNTYYQQNKNQPGSCDFNSAAVITNTDPSHDT

SEQ ID NO: 10964 - protein, 196 aa, Schizophyllum commune
MQAIKCVVVGDGAVGKTCLLISYTTNAFPGEYIPTVFDNYSANVMVDGKTISLGLWDTAGQEDYDRLRPLSYPQTDVFLICFSLVSPPSFENVRTKWYPEISHHAPQTPVVLVGTKLDLREDPATIEKLRDRRMSPIQYSQGVAMMKDIGAVKYLECSALTQKGLKTVFDEAIRVVLYPSARSDNKRSKGRSCIVA

SEQ ID NO: 10965 - protein, 168 aa, Zea mays
IALLLGLKGIHFVDEDGNDFCLVSVDDEYIIIGSANINQRSMDGARDSEIAMGAYQPYHLATRQPARGQIHGFRMSLWYEHLGMLEDVFQRPESVECVQKVNEVAEKYWDLYSSDDLEQDLPGHLLSYPIGVTADGSVTELPGMENFPDTRARVLGNKSDYLPPILTT

SEQ ID NO: 10966 - protein, 214 aa, Zea mays
GMRAFEAAKGAPAPRIGVPEYLERVHRYAALDPECYVVAYAYVDMAAHRRPAAAVASRNVHRLLLASLLVASKVLDDFHHSNAFFARVGGVSNAEMNKLEMELLDLLHFAVAVDHRVYHRYREHLETEMLRRDYHHGLMPVSGSAAPSKPRTTASSVVNNPPLPPPLTEGRRPAEAGDDGDDREEHEYRKVPNGLPAVNTMTTSSLRELWTFDY

SEQ ID NO: 10967 - protein, 240 aa, Brassica napus
VDPRVRAMPRLLPDVSDLTSFWNLFTVVPVLVTAFICHYNVHSIQNELDDPAQIRPVVRSALMLCSSVYIMTSIFGFLLFGDDTLDDVLANFDTDLGIPLGSVLNDAVRVSYALHLMLVFPIVFYPLRINIDGLLFPSARPLTTSNVRFGCLTAGLISVVFLGANFIPSIWDAFQFTGATAAVCLGFIFPASIILKDRHGRATSRDTTLAVFMIVLAVLSNAIAIYSDAYALFKKNAPRE

SEQ ID NO: 10968 - protein, 433 aa, Caldococcus noboribetus
MVSHPCTADEAKPPSEGQLARFENGKLIVPDNLIVAYFKGDGIGPEIVESAKKVLDAAVDKAYGGTRRIVWWEVTAGEEAQKECGSLLPDGTLQAFKLARVNLKGPLTTPVGGGFRSLNVTLRMVLDLYSNVRPVKWYGQPTPHCHPENIDWVIFRENTEDVYAGIEWPFDSPEAQKIRDFLKKEFGIELTPDTGIGIKPISKWRTQRHVRRAMEWAIRNGYKHVTIMHKGNIMKYTEGAFRQWAYDLILSEFRDYVVTEEEVNTKYGGKAPEGKIIVNDRIADNMLQQIITRPGEYNVIVTPNLNGDYISDEANPLVGGIGMAAGLDMGDGIAVAEPVHGSAPKYAGKNVINPTAEILSGMYLLSDFVGWPEVKLLVEYAVKQAIAHKQVTYDLAREMGGVTPISTTEYTDVLVDYIRHADLKPSRASEGLP

SEQ ID NO: 10969 - protein, 483 aa, Parachlamydia sp. UWE25
MMAAQLIPITVAEGDGIGPEIMDATLRILKAAGAPLDIKNVEIGEKVYLSGQPTGIENSTWDLIRQSKALLKAPITTPQGGGFKSLNVTIRTTLGLYANVRPCVAYYPFVETKYPGMNVVIVRENEEDLYTGIEYRQTPDVYEALKLITRPGCEKIIRYAFEYAQIYHRKKVTCFTKDNILKLTDGLFHKIFDEIGAEYPQIEKEHWIVDIGAAKLADTPTAFDVIVMPNLYGDILSDVAAQIAGSVGLAGSANIGNSGAMFEAIHGSAPRRAGQNLANPSGLLLAAIQMLVHLEQSNLAELIHNAWLKTLEEGIHTYDIFKEKTSKQKVGTKEFANAVTARLGKKPETLPAAHYSTSFHIKHSNFSSLKNFKQELYGIDIFIKWSEDVETLATLLQSTSNHDLKLKMINNRGVKVWPNKMPETACIDNWRCRFISSTNKIVSQEQILNLLNRLVQKKLTLTQTAYLFAFDGQAGYTLAQDEQ

SEQ ID NO: 10970 - protein, 460 aa, Emericella nidulans
MALPLRTARHASRLAQTIGRRGYATAEPDLKSALKAVIPAKRELLAEVKKQGDEVIGEVKVSNVIGGMRGLKSMLWEGSVLDADEGIRFHGKTIKDCQKELPKGPTGTEMLPEAMFWLLLTGEVPSTSQVRAFSKQLAEESHLPDHILDLAKSFPKHMHPMTQISIITAALNTESKFAKLYEKGINKADYWEPTFDDAISLLAKIPRVAALVFRPNEIDVVGRQKLDPAQDWSYNFAELLGKGGANNADFHDLLRLYLALHGDHEGGNVSAHATHLVGSALSDPFLSYSAGLLGLAGPLHGLAAQEVLRWILAMQEKIGTKFTDEDVRAYLWDTLKSGRVVPGYGHGVLRKPDPRFQALMDFAATRKDVLANPVFQLVKKNSEIAPGVLTEHGKTKNPHPNVDAASGVLFYHYGFQQPLYYTVTFGVSRALGPLVQLIWDRALGLPIERPKSINLLGLKK

SEQ ID NO: 10971 - protein, 213 aa, Zea mays
MGCFHSTAKRQHPGYEDPVHLASQTAFSVSEVEALFELFKSISGSVIDDGLINKEEFQLALFKNQRKENLFANRIFDLFDVKKRGVIDFGDFVRALNVFHPNIPMDEKVDFSFKLYDMDSTGFIERKEVKQMLIALLGESEMRLSDDIIETILDKTFSDADANQDGKIDRTEWENFVTRNPSLMKIMTLPYLKDITTTFPSFVFNSEVDDLVT

SEQ ID NO: 10972 - protein, 138 aa, Oryza sativa (japonica cultivar-group)
MVPAARSGWPAAAAVLVVVLVLSSPPGTSTVVVARAALSCSTVYNTLLPCLPYVQSGGAVPAACCGGIRSVVAAARTTADRRAACTCLKNVAAGAAGGPYISRAAGLPGRCGVSVPFKISPNVNCNAYVKTKNQINLY

SEQ ID NO: 10973 - protein, 85 aa, Glycine max
VNRAQARMYVICTGHKYMVGFPTRKTNNDITCIVSNGGRVQCMQVWPPFGKKKFETLSYLGDADDAQSLEELQFRFRNEGSLAWI

SEQ ID NO: 10974 - protein, 404 aa, Rickettsia sp. California 2
KIRGKIFRLPILKASIGEDVIDISRVSSEADCFTYDPGFMSTASCQSTITYIDGDKGILRHRGYDIKDLAEKSDFLEVAYLLIYGELPSIEQYNNFTKQVAHHSLVNERLHYLFQTFCSSSHPMAIMLAAVGSLSAFYPDLLNFKEADYELTAIRMIAKIPTIAAMSYKYSIGQPFIYPDNSLDFTENFLHMMFATPCTKYKVNPIIKNALNKIFILHADHEQNASTSTVRIAGSSGANPFACVSTGIASLWGPAHGGANEAVINMLKEIGSSENIPKYIAKAKDKNDPFRLMGFGHRVYKNYDPRAAVLKETCKEVLKELGQLENNPLLQIAIELEAIALKDEYFIERKLYPNVDFYSGIIYKAMGIPSQMFTVLFAIARTVGWMAQWKEMHEDPEQKISRPR

SEQ ID NO: 10975 - protein, 496 aa, Psychrobacter sp. 273-4
MSTAAKNTQANTYTDFHLQYIAGEWKKGDDDSINTNTNPFNGETLVEIQQATDKQLDEAYQAASDAQKQWAKQTPNERAAILYKVVSIFDQRQDEIVDWLIKESGSTRIKAMVEFSSARAITLEAASFPNRVHGEIRPSNTPGKENFIYREPMGVIAVISPWNFPLHLTQRSIAPALALGNAVVLKPASDTPITGGLLLAKIFEEAGLPKGLLNVVVGSGSEIGDAMVTHHVPSLVSFTGSTSVGKHIGELANGGEYIKQVALELGGNSPFVVLKDADIEQAVKAAAFGKFLHQGQICIAINRIIVEDEIYDDFVTRFVAHVKTLNVGDPNKADTAVGPIINKKQVASLKEKIVKAKDEGAKMLLSGEIKGQVVPPHVFSDVTREMDLSCNEVFGPLVGIIRAKDEDDALSIANDSMYGLSSAVFTQDMAKGLRFARGIKAGMTHINDISVNDESNAPFGGEKNSGIGRFNGEWILEEFTTLHWISMQHTPRDYPF

SEQ ID NO: 10976 - protein, 562 aa, Triticum aestivum
  misc_feature (350)..(350): Xaa can be any naturally occurring amino acid
DRATEEQLVTPWTVSVASGYNLLRDPRYNKGLAFTEKERETHYLRGLLPPAVTSQELQERKIMHNIRQYQLPLQRYMAMMDLQEGNERLFYKLLIDNVEELLPIVYTRTGGAGGRKYGSIFSRPQGLYISLKEKGKILEVLKNWPERSIQVIVVTDGERILGLGDLGCQGMGIPVGKLSLYTALGGVRPSACLPITLDVGTNNEELLNDEFYIGLRQRRAIGQEYADFLHEFMAAVKQNYGEKVLIQFEDFANHNAFDLLARYGTTHLVFNDDIQGTASVVLAGLVAALKLVGGTLAEHTYLFLGAGEAGTGIAELIALEMARQTKTPIDECRKKIWLVDSKGPRVRPRXGTRKESLQHFKKPWAHEHEHVGNLLDAVNAIKPTVLIGTSGKGQTFTQEVVEAISSFNEMPIILALSNPTSQAECTAEQAYTWSKGRAVFATGSPFDPVQYNGKTHVPGQANNAYIFPGFGLGVVMSGAIRVHDDMLLAASEALAQQVTQENFDKGLIYPPFSNIRKICAHIAANVAARAYELGLASRRPRPKDLVKYAESCMYSPIYRNYR

SEQ ID NO: 10977 - protein, 319 aa, Clostridium perfringens
MKKIAVLTSGGDAPGMNAALRAVTRMALHHGLEVMGVQRGYAGLINGELFKMDRKSVSEIINRGGTILRTARCLEFKQEEVREKAAQILKAYGVEALVVIGGDGSFMGAKLLSKLGVKTVGLPGTIDNDLSYTDYTIGFDTALNTVVDAINKLRDTSTSHERVSIVEVMGRNCGDLALYAGIAGGAEAIIVPEMPFDKDELIKTILEGRTNGKTHSIIVVAEGVGGSAELAKEIESVTGIETRATILGHIQRGGSPTADDIVLASRMGAKAVEVLLEGKTSKVIGIKENRIFDMDIDEALDIERSFDESLYEMANAINK

SEQ ID NO: 10978 - protein, 175 aa, Triticum aestivum
MAPTVMASSATSVAPFQGLKSTAGLPVSRRSNGASLGSVSNGGRIRCMQVWPIEGIKKFETLSYLPPLSTEALLKQVDYLIRSKWVPCLEFSKVGFIFREHNASPGYYDGRYWTMWKLPMFGCTDATQVINEVEEVKKEYPDAYVRIIGFDNMRQVQCVSFIAFKPPGCEESGKA

SEQ ID NO: 10979 - protein, 177 aa, Shewanella oneidensis MR-1
MMKFPLFILTSLMSTSVFAATCPSYLDVEVRKLHSEQSVNLCELTQGKPVLLINTASNCGYTSQFKALEALHKEYKDKGLVVIGFPSDDFFQEENDEKDTAKVCYINYGVTFTMLATSPVRGSDVNSVFKYLGDKAGAPKWNFYKYVVSGDGNTVMQFNSKVKPDSTELKQAIESVL

SEQ ID NO: 10980 - protein, 385 aa, Triticum aestivum
MEGGDARNGLTGTSQTTGSGVESPAKPLPPCCVKARAAAPESEAKCHATVVSGWFTETRSRCGKASKLQYYNNPMWPGETHSLKVDKILYQGKSPYQEVLIFESLTYGKVLVLDGIVQLTDKDECAYQEMITHLPLCSIPSPKKVLVIGGGDGGVLREIARHGSVESIDICEIDQLVIDVCKDFFPDLSVGFEDPRVRLHVGDAVEFLRNSPEGTYDAIIVDSSDPIGPAQELVEKPFFETIARALRPGGVLCNQAESMWLHTHLIQDMLSICCETFKGSVHYAWASVPTYPSGAIGFLLCAKEGRPVNFLAPINPIEKIEGAMTAGRDIRFYNTEMHRAAFVLPTFAKRELEAYSCSTIGAQQEEKSAEPAKVAVAPHSEILTA

SEQ ID NO: 10981 - protein, 465 aa, Yersinia pestis KIM
MKIVNHWIDGKNITSNDYFTTINPATGEVLADVASGGIKEINQAVAAAKSAFPHWANLPMKVRARLMRRLGELIEQQIPEIAQMETQDTGLPIYQTQNALIPRAAHNFEFFAEICQQMNGQTYPVDDQMLNYTLVQPVGVCALVSPWNVPFMTATWKVAPCLALGNTAILKMSELSPLTADKLGELALEAGIPAGVLNVVQGYGATVGDALVCHQDVRAISFTGGTATGNRIMQRAGLKKYSMELGGKSPVLIFDDADIERAMDAALFSIFSLNGERCTAGSRIFIQESLYSAFIQRFAERASRLRVGDPQDLDTQVGALISKPHWDKVSGYIQLGIEEGATLLAGGPDKPIDLPAHLRGGHFLRPTVLADVDNRMRVAQEEIFGPVACLIPFKNEDAGLRLARSIEAGMVFVNTQNVRDLRQPFGGIKASGTGREGGKYSFDVFAEVKNVCISMGEHPIPRWGM

SEQ ID NO: 10982 - protein, 145 aa, Arabidopsis thaliana
MGRGKIAIKRINNSTSRQVTFSKRRNGLLKKAKELAILCDAEVGVIIFSSTGRLYDFSSSSMKSVIERYSDAKGETSSENDPASEIQFWQKEAAILKRQLHNLQENHRQMMGEELSGLSVEALQNLENQLELSLRGVRMKKVLML

SEQ ID NO: 10983 - protein, 355 aa, Ustilago maydis 521
MPQYPSAAPGQKTFKLNTGAEIPVIGLGTWQSAPGEVAKAVESAIKAGYRHIVSMLTSLLTLTLGYVALHPLYIPFLAKDAAWIYGNENEVGQGIKASGVPRSELFVTTKIWCTYHRQPEACLDESLQRLGLDYVDLLLVHWPVPLVKRGDEKIPLNEDGSRAIDRDWSPEQTWELMEKLPATGKTKAIGVSNWSIAFLDKLLAKAKIVPAANQVELHPFLPQHELVKYCHDKGILPQAYSPLGSSGGPVLQDERVQSIAKAHKADPAQVVISWAAQRGVVALPKSVTPSRIETNGKLIVLSDEEMLELNELHKQEGKAVRLVKPNSDICSPPSETCLAPLNVADEALSYLRNSD

SEQ ID NO: 10984 - protein, 112 aa, Bartonella sp. Rf1563yn
ANEACLKMLQEIGSIKRIPEFIARAKDKNDPFRLMGFGHRVYKNYDPRAKIMQKTCHEVLKELNIQDDPLLDIAIELEKIALSDEYFIEKKLYPNVDFYSGITLKALGFPTE

SEQ ID NO: 10985 - protein, 202 aa, Methanopyrus kandleri AV19
MIALATGPRYRVPFRRRREGKTNYYKRRELIKADAPRLVARKTLNHNIAQIVDFAPHGDVTLASAHSIELRNKFGWKGHCGNTPAAYLTGYLCGLRALERGIERAVIDIGLHRPVRGSRVFAMLKGALDAGMDIPHGEEVLPPEDRIRGEHIANLARQIKEEDPEEYERRFSKYLERGLKPEELPEHFEEVKSKIEEEFGGA

SEQ ID NO: 10986 - protein, 382 aa, Ustilago maydis 521
MAPVANTKSSVELSALKDNLILMATHKKELELIKSTPAAPGPGMALVHVRATGVCGSDVHFWKHAGLGPWKIESQCALGHESGGIVIAVGEGVDNVVPGDRVAIEPGVPCFKATCDFCRTGKYNLCPTVDFYSVPPKDGTLKRYHEHPAGWLHKVPDNMSYEEIALLEPLSVTLQATLQAEISLGTPVLITGAGPIGIVQLLCASAAGATPIVITDVVKDRLDFAQKIVPGTFTYQIDPKKSPLESATEICKVFSKASGKHIAQGERDVQPAITMECTGIESSIQTASYATAASGLVFVIGVGANLQQIPFMHLSTNEITLKFLFRYRDTWPRAIRLVSSGKIDVKQIVTSRFPLEKAKEAVEHAADRSKFSVKTIIYDDQE

SEQ ID NO: 10987 - protein, 95 aa, Glycine max
  misc_feature (85)..(85): Xaa can be any naturally occurring amino acid
MEMFSSMISFPAVATVNRAGAGMVAPFTGLKSMAGFRTRKTYYVITSIASVGVRVQCMHVWPLIGWKTFATFHYLPDLDDALFAXVVAFLVRKGW

SEQ ID NO: 10988 - protein, 207 aa, Gibberella zeae PH-1
MATNITWHPSLSRKEREETRGQRGLTIWLTGLSASGKSTVATALEQHLLHLGVAAYRLDGDNVRFGLNKDLGFSEVDRNENIRRISEVAKLFADSSTIAITSFISPYRADRQVARQLHEQATQGGDAPIPFVEVYVDVPLEVAEQRDPKGLYKKARAGEIKDFTGISAPYEEPEKAEITIKTHENSVEECVAQIVEWLNEKGYLNKK

SEQ ID NO: 10989 - protein, 165 aa, Glycine max
  misc_feature (81)..(81): Xaa can be any naturally occurring amino acid
  misc_feature (89)..(89): Xaa can be any naturally occurring amino acid
MAIVYVLLVALITAASHAPHGAHGQTWHGDLAALAAAGKLRSDPNATLAASTDFGNITAALPGGVLFPSSPADVAALLRAXNTTVAWAXTISFRGRGQSVMGAGLALGGGGPHMPSLGGPGLRGGIQRGRGTAKNPPPGGNKRGDQPPGVKLWNAGGGPASRGTE

SEQ ID NO: 10990 - protein, 115 aa, Glycine max
  misc_feature (88)..(88): Xaa can be any naturally occurring amino acid
  misc_feature (100)..(100): Xaa can be any naturally occurring amino acid
QVNGEIYNHEELRKQLPNHKFRTGCDCDVIAHLYEEHGEDFVDMLDGIFSFVLLDTRDNSFIVARDAIGVTSLYIGWGLDGSVWISSXMKGLNDDCEHFXVFPPGHLYSSKERGF

SEQ ID NO: 10991 - protein, 318 aa, Pseudomonas putida
MSLNPDLAAYLQLVEAGRSAGKVLPMHALEADEARRQFEESSALIAGKADEPDCISDLSLTTRDGHTLPVRLYRPPQDDPALAGAALLYLHGGGYVVGSLDSHDTLCWNLAQDAGVPVIAVGYRLAPQWRFPTASDDALDAWRWLVEQAEALGIDAQRLAVVGDSVGGSLATILANQLAAQRELAAPRLQVMIYPVTDASCRRPSVQRYGSGYLLEAQTLEWFYQQYATVPADRLDPRFSPLLGSVASNSAPALMLIAECDPLHDQGVAYARHLEQAGVAVQLAVIPGVTHDFMRMGSIIEEADEGLVMVVEALQQHL

SEQ ID NO: 10992 - protein, 442 aa, Brucella suis 1330
MLTKTNAPSLDNFWMPFTANRQFKAAPRLLASASGMYYTDVDGNQVLDGTAGLWCCNAGHGRKRITEAVERQISTMDFAPIFQMGHNVAFDFAEKLAAIAPGGAEAKLDRVFFTNSGSESVDTALKIAIAYQRAIGQGTRTMVLGREKGYHGVGFGGISVGGLVNNRRVFPQIPADHLRHTLDIEKNAFSKGLPANGIELANDLERLVQLHGAEKIAAVIVEPMSGSAGVILPPKGYLERIRATADKYGILLIFDEVITGFGRLGTPFAVDYFGVVPDLVTTAKGLTNGAIPMGAVFAARKVYDGLMTGPENAIELFHGYTYSGHPVASAAGLATLEIYAEEGLLTRGAGLADYWQEALHSLKGAPNVIDIRNLGLVGAVELASRKDAPGARAYDIFVECFKKGLLIRVTGDVIALSPPLIIEKEQIDTIISVLGDAIKRAA

SEQ ID NO: 10993 - protein, 442 aa, Bradyrhizobium japonicum USDA 110
MLDETAGRAPGGAARWWLAQSLRALGAEIAARGGSLILRKGPAAGVIPEEARESGARAVYWNGIAQAPHQAIERRLEAALAKLGVDSQSFPGDLLVPPSAIRNKEGRGLRVFTPFWRRVLSLGDPPKPLPAPKQLRPGPKIVSDRLESWQLAPTKPDWAGGLRERWTPGEASARARLRDFLKTIARGYAGDRDRPDRVGTSGLSPHLRFGELSPRQVWHAARFAAAEDAALGPGIEKFLSELGWREFCRHLLHDHPDLATENLQTNFDGFPWQSDGKVLAAWQRGRTGYPIVDAGLRELWHTGVMHNRVRMVVASFLVKHLLIDWRDGEAWFWDTLVDADAGSNPANWQWVAGCGADAAPYFRVFNPQLQGEKFDPDGTYVRRWVPELQGLPAKLIHQPWQATPNELASAGVTLGKTYPQPIVDHARGRERALSAYAKIRKG

SEQ ID NO: 10994 - protein, 134 aa, Zea mays
PSIPYDPMALRKAFDKPVSLVTAVAVRHLAGTEAARRLGTKLHSFYVGLKGSPDLKAAREDDIDAIEDVIYHTEAYDVTTIRASTPMFLMSHKIKSLGVKMVISGEGSDELFGGYLYFHKAPNKEELHRETCRK

SEQ ID NO: 10995 - protein, 175 aa, Triticum aestivum
MAPAVMASSATTVAPFQGLKSTAGLPVSCRSGSTGLSSVSNGGRIRCMQVWPIEGIKKFETLSYLPPLSTEALLKQVDYLIRSKWVPCLEFSKVGFVFREHNSSPGYYDGRYWTMWKLPMFGCTDATQVLNEVEEVKKEYPDAYVRVIGFDNMRQVQCVSFIAFRPPGCEESGKA

SEQ ID NO: 10996 - protein, 349 aa, Zea mays
MGERGAEEDGSGGSSLSLMCLEDGADLDAGGSAESADDGEPAVVAHSDAGEDQEEEYMDYLVSKESSFCCSPSSSPVSSDAGAETRPSSTASSSDEWFRCARHATVAWVLETRAYFGFSHRAAYLAVSYMDRFCLRRCMDVSVMPWAARLLAVACLSLAAKMEEYRAPALSEFRAHDDYDFSSVCIRRVELLVLSTLGWRMGGVTPLDYLPCLSFRLRRGGGGGLIAAKAAALIFSAAEAASVLDYRPSTVAVAAVLAAAHGAMTKEALECNMSSLTPSCLLDKDDVHACYSTMLSESSSPTPSKLADKRPPPSSSGSTMYESVDAASSFAATAGRSKRARLEMPAIGP

SEQ ID NO: 10997 - protein, 277 aa, Bacillus sp. KSM-K16
MIPTVTLKDGLQLPAIGFGTYALNGAAGVNAMVSAIDIGYRLLDSAFNYENEGAVGEAIRRSSVPRAQLRVTSKLPGRRQAYAQAIVTIQESLLRARLDYYDLYLIHWPNPKTDLYVEAWQALIDAQKWGLIRSIGVCNFLPEHLERLERETGVMPSINQIELHPYFSQESQRVWDNNHHIVTESWSPLGRASSVLQDKVIKQIAATHRKSVSQIILRWHVQLGAIPLPKSASPERQLENIAIFDFSLSTEEMEQINKLTKADGRIQNQDPAEYEEF

SEQ ID NO: 10998 - protein, 347 aa, Oryza sativa (japonica cultivar-group)
MAARWRGIPWCRSLPNGPSSPVDMVVDYYLYDYEYAEPPRVTSLQNAVPQRTFSDFGDDVYFVADKRGYESVVHYLAGQYLNTDDSGNVADPRLQLNKVVREISYSSSGVTVKTEDGSVYQADYRHGLCQLGSPAERSYTVQATAASSDRCVLHVFDQKWKILAIYEFDMAVYTKIFVKFPKRFWPEGEGREFFLYASTRRGYYGIWQEFEKQYPDSNVLLVTVTDKESRRIEQQSDNQTKAEIMEVLRNMFPDQDVPDATDILVPRWWSNRFYKGTFSNWPIGVNRYEYDQLRAPIERVYFTGEHTSEYYNGYVHGGYLAGIDSAEILIDCAQNQMCKYHVQGKYD

SEQ ID NO: 10999 - protein, 467 aa, Agrobacterium tumefaciens str. C58
MTIDIKNIAEMDRNAVLHPFTQLKDFASGKLGEPTIVETGKGIRIQDAHGKQLIDGFAGLYCVNVGYGRTEVAEAISRQAYRLAYYHSYAAHTTDELAILSDRLVRMAPGKMSKVFYGMSGSDANETQAKLVWYYNNLRGKPQKKKIISRERGYHGCSVVAGSMTGMSFYHDHMDLPRVGILHTGVPHHYWGAEAGETELEFSKRRAAELEALILREGPDTIGAFIAEPVLGTGGITPPPEGYWPAIQEVLKKYDVLLIADEVITGFGRTGSMFGSQHYGIEPDLITVAKGLTSAYFPLSGAIVGEKVYTVMEDGADRVGAFSHGYTYSGHPIGAAAANAVLDIVEKEDLPGNAQAVGSYFQEQLKAKFAQLPIVGEVRGVGLMGAIEFVADREKKTRFAPHLTVGARVSKAARNGGLIARAMPHGDILGFAPPLVTTKAEVDEIIAIAEAAVRTVMDDLVQAGEKI

SEQ ID NO: 11000 - protein, 397 aa, Lycopersicon esculentum
MSSSLHSPLYSSLSSSSALQDRKLRNAVNFAKPNLIFKPRRSFPLIRASAGFSSSLDTGLSTELDAVANHSEIVPDTVIFDDFEKFPPTAGTASSSLLLGICGLPDTKFKSAVDRALSDSECYGLESSDLQMSCFFNKALAHVGGDLAKLVPGRVSTEVDARLAYDTHGIVRKVHDLLKAYTEIEVPPERLLFKIPATWQGIEASRVLEAEGIQTHLTFVYSFCQAAAAAQAGASVIQIFVGRLRDWSRNHTGDSEVESALRRGEDPGLALVTKTYNYIHKYGHKTKLMAAAVRNKPDVFNLLGGGYIITPLKVLQSLKESVTLLDEKYSFTRRLSPQSAAAFNFTQDELQKWDQYSFSSAMGPASVELLTIGLDGYINQAKRVEELFGKIWPPPNV

SEQ ID NO: 11001 - protein, 492 aa, Agrobacterium tumefaciens str. C58
MKGIASAALKNLHRRDLIEDRAFVNGAWVERDQMFAIVDPAGGDHLADVASCTLNDVDFAIDAASKAFAGWRDMLPVDRGDILRNWSARMRENAHDLATIISAEQGKPLAESRGEIAYAANFLDWFASEGERSYGETIPTHLKGSNLSVRMQPIGVTVAITPWNFPSAMIARKAGAALAAGCTMIVKPAPETPLSALALARLAEESGVPPGVLQVLPGEAAPLARRLLENTEVRAFSFTGSTEVGRILLTQSAATVKKASLELGGHAPFIVFADADLTEAVKGCLGAKFATSGQDCLAANRIYVQRSLYPRFVERFAEATSRLTVGHGLETGVDIGPMTRPSVAEKCRQQVAQALSAGARLVCGGQDSPLGGNFVTPTVLADVTDDMLIAREETFGPVAAILPFDDEAEVIRRANATEMGLAAYLYTNDLGRAMRLTDQLEYGMVAVNTPKFTGAPIPFGGWKQSGLGREGSRHGLMEYLEPKYVCFGNLAA

SEQ ID NO: 11002 - protein, 422 aa, Wolinella succinogenes
MGTVTFTNNETGEKFEFEILNPTRGPQLVDFSKFYETTGMFTFDPGYGSTANCKSEISFVDGKKGELVYYGHPIEELVEKYKFVDVIKLLIGNGYIFPTKEESDQFERELVRRSYIHEGLRKIIDAFPDGAHPMANLSSSVSALSTFYYDHIDMEYEAEYQTMARRIIAKTPTLAAFAYRSSVGSPFVYPDADRGYVENFLYMLRAYPHGKLKEEISPIEVSALDTIFMLHADHGQNASTATVRNVASTGVHPYAALSAGLSALWGKAHGGANESVMDQLEMIGDVKNVDRYIAKAKDKNDSFRLMGFGHRVYKSYDPRARILRKLKDDLDQKGVKMNQRLVEIAEKIEEVATQDEYFLSRSLYPNVDFYSGIILTALKIPKSMFTPIFAIGRMPGWCGQVLELLQEPNVKITRPRQMYVGK

SEQ ID NO: 11003 - protein, 121 aa, Solanum melongena
SSKDSKQLDAEVHRKYIYGGHVAAYMNILMEDEPEKYQSHFSSYIKADLAPDNIEEMYKKVHAAIRPDPSPKKSQKQPPKTHKRYNLKKLTYEERKAKLIERLNALNAAGGNDDDDEEDDE

SEQ ID NO: 11004 - protein, 168 aa, Zea mays
SILQIKVEDMDAYAPKDLLVVTTGSQGEPRAALNLASYGGSHTLKLSKEDVLLYSAKVIPGNETRVMKMMNRLTDLGPKIIMGKDSGLHTSGHAYREELEEVLRIVKPQHFLPVHGELLFLKEHESLGRSTGIRHTTVIKNGEMLGVSHLRNRRVLSNGFVSLGKEDL

SEQ ID NO: 11005 - protein, 430 aa, Wolinella succinogenes
MANFEGYNPRFLPLPTEGEAITLTPEGILQVPDHPIIPYIEGDGIGMDITPAMKSVVDAAVNKAYGGKRKIAWYEVYTGEKCYEKFKNEKSLSPMDQWLLPDTIDAINYFKVSIKGPLTTPVGEGFRSLNVALRQMMDLYVCLRPVRWYGSPSPVKEPHKVDMVIYRENSEDIYAGIEFAAESKEANKVIQFLQNEMEVKKIRFPKTSAIGIKPVSKEGSERLIRKAIQYAIDNDRASLTFVHKGNIMKFTEGGFMKWGYELLKREFGATEIDGGPWCSMKNPKTGKEIIIKDVIADAFLQQILLRPAEYDVIATMNLNGDYISDALAAMVGGIGIAPGANLNDSVAMFEATHGTAPKYAGLDKVNPGSLILSAEMMLRHMGWIEAADLVVSSMKKAIESKNVTYDFARLMEGAKEVKCSEFAQVMIERM

SEQ ID NO: 11006 - protein, 197 aa, Medicago sativa
MSGSRFIKCVTVGDGAVGKTCLLISYTSNTFPTDYVPTVFDNFSANVVVDGSTINLGLWDTAGQEDYNRLRPLSYRGADVFLLAFSLISKASYENIAKKWIPELRHYAPGVPIILVGTKLDLRDDSQFFQDHPGAAPITTAQGEELRKLIGAPVYIECSSKTQKNVKAVFDSAIKVVLQPPKQKKTKRKGQKACSIM

SEQ ID NO: 11007 - protein, 179 aa, Wolinella succinogenes
MALEGESPQGWVIWITGLAGSGKTTLGRAVYEALRREISHVVYLDGDGFREIFGHSGYDRESRIEISKKRSALCAFLASQGIHVVATAISMFDEIYRLNRQNIPRYLEVYVKCEMEELIRRDQKNLYTKALKGEIQEVVGVDIAFDEPSAHVVIDNTLWGSIDEKRDRILSEIYIQGIR

SEQ ID NO: 11008 - protein, 312 aa, Zea mays
  misc_feature (152)..(152): Xaa can be any naturally occurring amino acid
  misc_feature (155)..(155): Xaa can be any naturally occurring amino acid
IFEPKAGVQRTCVHRAERSAGPVRRPPADATTNGCPPSGPGGAAGGAEAGAFGGAILLLWAWRVGSRRRGLRRPALRQRRGPLPSLPPPTPPRRGPISPALLLHNSAVSLLHSSLTSVSVIFVLAKQWRNKGLEYVFEQEELFGCIWLGTFXSSXHACGYFAYDQLDMLRYRLYSGWLPGILMHHLILLICFTLALYRNVTINYLNLSLVCELHSIFLHVRKVRRMVGFRDFDRTVVKLEWVLNWTTFVTARVICHILITYKLISDAHKFGKGIELPLALLGMAGMNLLNIFLGLDLLKAFTRERNKQNHQD

SEQ ID NO: 11009 - protein, 368 aa, Sordaria macrospora
MATHNIVVFGGDHCGPEVVVEAIKVLKSIETNSPSAGKFNLQNHLLGGASIDKHHDPLTDEALNAAKAADAVLLGAIGGPEWGTSSTVRPEQGLLKLRKELGTYGNLRPCNFASESLVDSSPLKAEVCRGTDFIVVRELTGGIYFGDRTEDDGSGYACDTEPYSRAEIERIARLAGFLALAKNPPAKVWSLDKANVLATSRLWRKTVTDVISKEFPQLQLEHQLIDSAAMLLVKNPRALNGVVITSNLFGDIISDEASVIPGSIGLLPSASLGGIPDGKGKCNGIYEPIHGSAPDISGKGIVNPVGTILSVAMMLRYSLNLPKEADAVEAAVKAAIDNGTKTKDLGGSATTSDMGNAVVAELEKILKA

SEQ ID NO: 11010 - protein, 115 aa, Leonurus artemisia
MAALIKLMCTMLIVAAVVAPLAEAAIGCNTVASKMAPCLPYVTGKGPLGGCCGGVKGLIDAARTTPDRQAVCNCLKTLAKSYSGINLGNAAGLPGKCGVSIPYQISPNTDCSKVH

SEQ ID NO: 11011 - protein, 251 aa, Triticum aestivum
MMGYQKGVDIEAGTSGGTGTAAPTRGLYPGMTESPELRWALIRKIYVILSLQLLLTAVVAAVVVKVRAIPHFFVSSSAGLGLYIFLIIFPFIVLCPLYFYRQKHPVNLLLLGVFTVAISFAVGMTCAFTSGKVILEAAILTTVVVFSLTAYTFWAAKRGQDFSFLGPFLFASLIMLLVFGFIQILFPMGKLSHMIYGALAALIFSGYIVYDTDNIIKRYTYDEYVWAAVSLYLDVINLFLALLTLFRAGDS

SEQ ID NO: 11012 - protein, 279 aa, Bacillus cereus ATCC 10987
MKNLQSTTTLHNGVEMPWFGLGVFKVEDGPELVEAVKSAIKAGYRSIDTAAIYGNEKAVGEGIRAGIKEAGISREDLFITSKVWNSDQGYETTLAAYEESLKKLELDYLDLYLVHWPVEGKYKDTWRALETLYKEERVRAIGVSNFQIHHLQDVMKDAEIKPMINQVEYHPRLTQKELQAFCKEQGIQMEAWSPLMQGQLLDNETLQAIAEKHGKTTAQVILRWDLQNGVITIPKSTKEYRIIANADVFNFELTKEDMEKIDALNQNHRVGPDPDNFDF

SEQ ID NO: 11013 - protein, 311 aa, Picrophilus torridus DSM 9790
MDRNELLKEPVKDISIKSETTISELIGMFGRSGGFTAKKIYEGYEIIKEMFNDDETTFLSFPADIISTGTRGIINELVKRKLVDVIITTNGTLDHDIARTYRDYYAGTFNFSDAMLRDLGINRLGNVFVPDESYGSIIEEKVMPILDELYKEKKEWSGYELIWELGKRINNESSIIYNAYKNRIPVFIPGMTDGSVGSQLWSFYEMNRDFRINLLEDEHKLSDIIFDAKKTGAIMIGGGISKHHTIWWNQFRDGLNQAVYITTAQEYDGSLSGAKLEEAISWKKVREDARFVNIYGDATVILPLIVAPFLK

SEQ ID NO: 11014 - protein, 131 aa, Zea mays
  misc_feature (82)..(82): Xaa can be any naturally occurring amino acid
  misc_feature (104)..(104): Xaa can be any naturally occurring amino acid
ALVFSCRSRNELRGCITRLTDPWSPSYTLCRYQGVVPIKVNQNKHFLHDKVRGVQQWNYGLEAGSKPELLIAMSCLPSTEAXPKPNLICNGYKDARLHGDCALXRAMGLNLIIVLEMEEELAICLDQYRKL

SEQ ID NO: 11015 - protein, 341 aa, Streptomyces avermitilis MA-4680
MRIGVLTSGGDCPGLNAVIRSVVHRAVVDHGDEVIGFRDGWKGLLECDYLKLDLDAVSGILARGGTILGSSRVQPAHLRDGVERARGHVAELGLDAIIPIGGEGTLKAARLLSDAGLPIVGVPKTIDNDIAVTDVTFGFDTAVGVATEALDRLKTTAESHQRVLIVEVMGRHTGWIALHSGMAAGAHAIVVPERPFDIEELAAKVGERFEAGKRFAIVVAAEGAKPRAGSMDFDEGKKDVYGHERFAGIARQLSLELEERLGKEARPVILGHVQRGGTPTAYDRVLATRFGWHAVEAVHRGEFGKMTALRGTDIVMVSLAEAVETLKTVPEERYAEAECVL

SEQ ID NO: 11016 - protein, 472 aa, Zea mays
  misc_feature (7)..(7): Xaa can be any naturally occurring amino acid
  misc_feature (13)..(13): Xaa can be any naturally occurring amino acid
GVVYIAXWSRDTXVVLVRDPGGASASSESLGELLIRKADEGVAVLMLVWDDRTSVGLGPIKRDGLMATHDQDTASFFRDTRVQCVLCPRNPDKDRSYVQDIETATMFTHHQKTVIVDGGGAPAPETPPGLVSFLGGIDLCDGRYDTQDHPLFRTLGTTHSKDFHQPNFPGASISKGGPREPWHDIHCRVEGPAAWDVLENFEQRWKKQGKGDNLLVALNKAWAEREAAPRGDAESWNVQVFRSIDGGAAAGFPEGSANAPREAAALGLVSGKDHVIERSIQDAYIHAIRRARDFIYIENQYFLGSSYAWRQNDGVTVEDINALHLIPKELSLKIVSKIEAGERFVVYVVVPLWPEGVPESGSVQAILDWQRRTMEMMYKDVTLAIRARGLRADPRDYLTFFCLGNREAPSPGEYVPPEHPDPNTDYERAQQARRFMIYVHAKTMIVDDEYIIVGSANINQRSMDGGRRLVDI

SEQ ID NO: 11017 - protein, 90 aa, Glycine max
ITELAGCDRLTISPALLEELTKSTDKLAKKLDPETAAKAYSGEKLSYDEKDFRLSMNEDAMATDLLAEGIRGFSADIVKLEQILKAKLSA

SEQ ID NO: 11018 - protein, 482 aa, Escherichia coli CFT073
MKLNDSNLFRQQALINGEWLDANNGEVIDVTNPANGDKLGSVPKMGADETRAAIDAANRALPVWRALTAKERANILRNWFNLMMEHQDDLARLMTLEQGKPLAEAKGEISYAASFIEWFAEEGKRIYGDTIPGHQADKRLIVIKQPIGVTAAITPWNFPAAMITRKAGPALAAGCTMVLKPASQTPFSALALAELAIRAGVPAGVFNVVTGSAGAVGNELTSNPLVRKLSFTGSTEIGRQLMEQCAKDIKKVSLELGGNAPFIVFDDADLDKAVEGALASKFRNAGQTCVCANRLYVQNGVYDRFAEKLQQAVSKLHIGNGLEKGVTIGPLIDEKAVAKVEEHIADALEKGARVVCGGKAHERGGNFFQPTILVDVPANAKVSKEETFGPLAPLFRFKDEADVIAQANDTEFGLAAYFYARDLSRVFRVGEALEYGIIGINTGIISNEVAPFGGIKASGLGREGSKYGIEDYLEIKYMCIGL

SEQ ID NO: 11019 - protein, 505 aa, Bradyrhizobium japonicum USDA 110
MNKVEFLSVTKVPFAERYDNFIGGKFVAPISGKYFDNASPVNGQIVCKIARSDAQDVEAALDAAHAAKAGWGSTSVAERAAILNKIADRMEENLERLAIAETWDNGKPIRETRAADIPLAIDHFRYFAGVVRAQEGSIGEIDHDTIAYHFHEPLGVVGQIIPWNFPLLMACWKLAPALAAGNCVVLKPAEQTPASIMVWAEIIGDLLPPGVLNIVNGFGLEAGKPLASSPRIAKIAFTGETSTGRLIMQYASQNLIPVTLELGGKSPNIFFKDVTAEDDDFFDKAIEGFVMFALNQGEVCTCPSRALVHADIYDRFMERALKRVAAIKQGDPRAADTMIGAQASGEQLAKILSYIDIGKQEGAKVLAGGGRAELGGDLSGGFYVQPTVFEGHNKMRIFQEEIFGPVVSVTTFKTDDEALAIANDTLYGLGAGVWSRDANRCYRFGRAIQAGRVWTNCYHAYPAHAAFGGYKQSGVGRETHKMMLDHYQQTKNLLVSYSPKKLGFF

SEQ ID NO: 11020 - protein, 367 aa, Methanopyrus kandleri AV19
MPPKWYRHVMRVLSESHVVLEVRDVRYPEETRWEKLPRLEDVFDFTRVVVLNKADLVPRAETERVKEEVELEEDVPAVYVSARERMGFRHLRRTIYEVAPEDVETVRVGVVGFQNVGKSTIINALTRRSAAETSRRAGYTRGKQWVRGGRKLLVIDSPGVIPTDEAAAEAVALDPDVLEDPVEPALGVIERVVREYPGALSDKFGIDESMDPERILRDISERLGKDLRTTAKLLLREWVDGSLVEIYRTTRADLAETSELEVGGTAQRLVEETLREIEEVVPEGIPPSAATVRGILTRLAHGENVDGVGFGTIRLGEYGVGVSVGDRYYDRMVRRLRRELGGEVISEERFRVGANGRKAVALVTKGR

SEQ ID NO: 11021 - protein, 139 aa, Triticum aestivum
  misc_feature (34)..(35): Xaa can be any naturally occurring amino acid
  misc_feature (40)..(42): Xaa can be any naturally occurring amino acid
  misc_feature (44)..(44): Xaa can be any naturally occurring amino acid
  misc_feature (48)..(48): Xaa can be any naturally occurring amino acid
  misc_feature (52)..(52): Xaa can be any naturally occurring amino acid
  misc_feature (55)..(55): Xaa can be any naturally occurring amino acid
  misc_feature (59)..(59): Xaa can be any naturally occurring amino acid
  misc_feature (67)..(67): Xaa can be any naturally occurring amino acid
  misc_feature (71)..(71): Xaa can be any naturally occurring amino acid
  misc_feature (84)..(84): Xaa can be any naturally occurring amino acid
  misc_feature (91)..(91): Xaa can be any naturally occurring amino acid
  misc_feature (94)..(94): Xaa can be any naturally occurring amino acid
  misc_feature (97)..(98): Xaa can be any naturally occurring amino acid
  misc_feature (102)..(102): Xaa can be any naturally occurring amino acid
  misc_feature (104)..(106): Xaa can be any naturally occurring amino acid
  misc_feature (109)..(109): Xaa can be any naturally occurring amino acid
  misc_feature (113)..(113): Xaa can be any naturally occurring amino acid
  misc_feature (116)..(116): Xaa can be any naturally occurring amino acid
  misc_feature (126)..(126): Xaa can be any naturally occurring amino acid
ADPSIPSLPLSLDHPCPRTEDRRRPTPSTSETKXXSGASXXXPXQGGXIRKXGHXVIMXRPCKVVEXSTSXTAKHGHAKCHFVXAIDIFNXKNXEDXXPSSXNXXXPHXDRQXYQXLIDISDDGYXHLLTESGNTKDDL

SEQ ID NO: 11022 - protein, 491 aa, Burkholderia cepacia R1808
MADWQDKAASLRIEGRAFIDGASRDAHGGKTFDCVSPIDGRVLAKVADCGEADVNAAVAAARRAFDAGVWAGLNPRARKAVLLRWAALMRTHLDELALLETLDAGKPIGDTTTVDVPGAAYCVEWFAEAIDKVGGEVAPADHHLVGLVTREPVGVVAAVVPWNFPILMAAWKFGPALAAGNSVVLKPSEKSPLTAIRVAQLAYEAGIPAGVFNVVPGAGEPGKLLALHRDVDCIAFTGSTAVGKLIMQYAAQSNLKRAWLELGGKSPNIVLPDCPDLERAAQAAAGAIFYNMGEMCTAGSRLLVHRDIKDAFIAKLVAAARAYVPGNPLDPSVSMGAIVDGIQLERVLGYIEAGRSEGTLVTGGARVRQETGGFYVEPTVFEVKPDAKIAREEIFGPVLSVIVFDDVDEAVRIANDTEYGLAAAVWTSDLTTAHDVSRRLRAGTVWVNCYDEGGDMNFPFGGYKQSGNGRDKSLHALEKYTELKSTLIRLR

SEQ ID NO: 11023 - protein, 102 aa, Triticum aestivum
RFKCFPPIRDAANKENLWEALLDGHIDMLSSDHSPSTPDLKLMEEGNFMKAWGGISSLQFVLPVTWSHGKKYGITLNQLASWWSEKPAELAGQKNKGSILPG

SEQ ID NO: 11024 - protein, 343 aa, Listeria innocua Clip11262
MKAVVKTNPGYDQMELRDVEEPQVYGDKVKIKVAFTGICGSDIHTFKGEYKNPTTPVTLGHEFSGVVVEVGPDVTSIKVGDRVTSETTFETCGECIYCKERDYNLCSNRRGIGTQANGSFAEFVLSREESCHVLDERISLEAAALTEPLACCVHSALEKTTICPDDTVLVFGPGPIGLLLAQVVKAQGATVIMAGITKDSDRLRLAKELGMDRIVDTLKEDLAEVVLGMTDGYGAERVFDCSGAVPAVNQGLPLTKKKGDFIQVGLFAEKKNAIDEESIIQREIAYIGSRSQKPSSWILALDLLANGKINTDKMITKVYGLDDWREAFEAVMAGNEIKVLVKS

SEQ ID NO: 11025 - protein, 350 aa, Listeria innocua Clip11262
MRAAVLYENNVIKAEQIDEATCGKDQVRVEVKAVGICGSDIHKMQTRWKYPLPAVMGHEFAGVVTEIGSEVTNVAIGDRVAGIPLEPCMECNYCKAGDFALCDNYRMVGSHFHGGFAENVVMKADNVISIGDLDFEEGAMIEPLAVSMHGVLGIEPRLGDTVIVFGIGTIGILVVQCLLLAGVKDIIAVDISDKKLADAREFGCKYTINPKNEDLKERVFAYTNGLGADIALECAGSKITQEQCLLVTKKKGKVGYLGIAYADVLLHEEAFENIFRRELTLKGFWNSYSAPFPGEEWRTSIEFVKQGRIKLKPLISHRYKLEETKEAFDMILSREHDYNKVMILPQKGDD

SEQ ID NO: 11026 - protein, 154 aa, Synechocystis sp. PCC 6803
MPLPTSLTTLDGTPLAPEVIADKVVLFVNVASKCGLTPQYSGLVALDKAYGEKGLVIIGVPCNQFGAQEPGSPEEIKDFTKTKYDVDFTLLEKQDVNGPNRSPLYQFLVGDGEDISWNFGKFLIGRDGQVVARFDPQTKPDDTNLKAAIEKALG

SEQ ID NO: 11027 - protein, 477 aa, Burkholderia cepacia R1808
MTYRNESAWVQPAAPATAPRTTQARTTAEYRALDAAHHIHPFSDMGALNRAGSRVIVKADGVYLWDSDGNKIIDGMAGLWCVNVGYGRKELADAAYRQLQELPFYNTFFKTTHPPVIELSAMLAEVTPAGFNHFFYCNSGSEGNDTVLRLVYQYWRVQGKPQKKYVISRHNGYHGSTIAGATLGGMDYMHEQMPSKVEHIVHIDQPYFFGEAQAGETPEAFGLARAQQLEAKILELGAENVAAFIGEPFQGAGGVIFPPSTYWPEIQRICRKYDILLVADEVIGGFGRTGEWFAHQHFGFEPDLITMAKGLTSGYVPMGAVGIHERVARPIIDNGEFNHGLTYSGHPVAAAVAVANLKLLRDEGIVERVKRDTGPYFQALMRDTFAQHPIVGEVHGQGMVASLQLAQAPAERRRFANGGEVGTICRDFCFNGNLVMRATGDRMLLSPPLVISRQEIDELVSKAKKAVDATAQQLGLS

SEQ ID NO: 11028 - protein, 334 aa, Glycine max
MGEIALPNGISNGNINGVNGQSHSLNGYRKSCWYEEEIEEDLRWCFALNSILHTGASQYQDIALLDTKPFGKALVIDGKLQSAETDEFIYHECLVHPALLHNPSPKNVFIMGGGEGSTARELLRHKTIDKVVMCDIDEEVVNFCKSYFVVNKEAFRDTRLEVVINDARVELEARDESYDVIIGDLADPIDGGPCYKLYTKSFYELIVKPRLKQGGIFVTQAGPAGIFSHTEVFSCIYNTLRQVFKYVVPYSAHIPSYADIWGWVMASDSPLDLSAEELDLRMRHRIKGENGYLDGKTFTSASTLSKTVRNSLDNETHVYTEESARFIYGHGKHA

SEQ ID NO: 11029 - protein, 348 aa, Mesorhizobium loti MAFF303099
MRALVLEKKGELSLREIALPLDVGPDDVKIAIHTVGVCGSDVHYYTHGAIGSYVVRAPMVLGHEAAGTVVETGANVETFKAGDRVCMEPGVPNLSSRATKLGIYNVDPDVSFWATPPVHGVLAPYAVHPAAFTYKLPDNVSFAEGAMVEPFAIGMQAASRARIVPGDVAVVVGCGPIGIMIALAALAGGCSKVLISDFSAPKLKIAAQYAGIVPVNIGERSLVDAVAAATDKWGADIVFEASGSPKAFADLFDVVRPGGAVVLVGLPVEPVALNVPAAISKEVRIETVFRYANIFDRALQLIASGKVDLKPLITGTYDFADSIKAFERAAQGNPEDVKLQILLTGEKG

SEQ ID NO: 11030 - protein, 280 aa, Oceanobacillus iheyensis HTE831
MVNQIPNVTLHDGLTIPKVGFGTYRLNGNDGVQAINNAIDHGYRLIDTAYNYENEGTVGEAVRRSSTPREQLLITSKLPGRYHHYDKAVTTIQESLYRANLDYYDLYLIHWPNPIQDIYVEAWQALIEAKRRGYIRSIGVCNFLPEHLERLKQETGELPTINQIELHPFFNQEDQRKWHQEHQIATESWSPLARTNDVLDHPVLQKLASNHNRTVSQIILRWHYQLDAIAIPKSATPSRQLENISIFDFELSDEEMSIINQLSKVDGRMKDQDPAVYEEF

SEQ ID NO: 11031 - protein, 413 aa, Rickettsia heilongjiangii
IAELKIRGKIFKLPILKASIGEDVIDISRVSAEADCFTYDPGFMSTASCQSTITYIDGDKGILRHRGYDIKDLAEKSDFLEVAYLLIYGELPSGEQYNNFTKQVAHHSLVNERLHYLFQTFCSSSHPMAIMLAAVGSLSAFYPDLLNFKEADYELTAIRMIAKIPTIAAMSYKYSIGQPFIYPDNSLDFTENFLHMMFATPYTKYTVNPIIKNALNKIFILHADHEQNASTSTVRIAGSSGANPFACISTGIASLWGPAHGGANEAVINMLKEIGSSEYIPKYIAKAKDKNDPFRLMGFGHRVYKNYDPRAAVLKETCKEVLKELGQLDNNPLLQIAIELEAIALKDEYFIERKLYPNVDFYSGIIYKAMGIPSQMFTVLFAIARTVGWMAQWKEMHEDPEQKISRPRQLYTG

SEQ ID NO: 11032 - protein, 424 aa, Atriplex prostrata
YLRAIAAKITERKDHFVKLETLDSGKPFDEALLDIDDVAGCFEYYADQAEALDAKQKAPIALPMDTFKSHVLRQPIGVVGLISPWNYPLLMATWKVAPALAAGCAAILKPSEMASVTCLELADVCKEVGLPPGVLNILSGYGPEAGGPLASHPDVDKVAFTGSTATGSKIMSSAAQLVKPVTLELGGKSPIILFEDVDLDQAAEWAAFGCFWTNGQICSATSRLLVHESIAAEYLDKLVKWCKNIKISDPFEDGCRLGPVVSKGQYEKVLKFISTAKSEGATILCGGSRPEHLKKGYFIEPTIISDVSTSMQIWKEEVFGPVLCVKTFSSDEEAIELANDTQYGLGAAVLSKNLERCEKVTKALEVGIVWVNCSQPCFCQAPWGGAKRSGFGRELGEWGIENYLNIKQVTSDISDEPWGWYKSP

SEQ ID NO: 11033 - protein, 399 aa, Bacillus cereus ATCC 10987
MLENQINERSLLLHKELVGKIEITSKVEVNSADDLSLTYTPGVAESCKAIAADEETVYDYTARGNMVAVISDGTAVLGLGNIGPKAAMPVMEGKSILFKKFANVDAFPLCLGTTDVDEIVTLVKNLEPTFAGINLEDIAAPRCFEIEKRLKEETNIPVFHDDQHGTAIVVLAAVINALKVVRKQMDHVKIVINGAGSAGIAIGKLLLKAGAQHITLVSLEGIVCEGETWMNEAQIEVSKKTNREHVRGTLKEAIHQADIFIGVSAPNVLTKEFVQTMNEKAIVFAMANPIPEIFPEDALEAGAAVVGTGRSDYANQVNNVLAFPGIFRGALDVRATDITEEMKLAAAYGIANIITDEERNANYVIPNPLDKRVVPSVAEAVAKAAIDSGVARITRIPSY

SEQ ID NO: 11034 - protein, 500 aa, Atriplex prostrata
MAFPIPVRQLFIDGEWREPLLKNRIPIINPSTEEIIGDIPAATAEDVEVAVVAARKAFKRNKGRDWAATSGAHRAKYLRAIAAKITERKDHFVKLETLDSGKPFDEAVLDIDDVASCFEYFAGQAEALDAKQKAPVTLPMDRFKSHVLRQPIGVVGLISPWNYPLLMATWKIAPALAAGCTAVLKPSELASVTCLEFGEVCNEVGLPPGVLNILTGLGPDAGAPIVSHPDIDKIAFTGSSATGSKIMASAAQLVKPVTLELGGKSPVIMFEDIDIETAVEWTLFGVFWTNGQICSATSRLLLHESIAAEFVDRMVKWTKNIKISDPFEEGCRLGPVISKGQYDKIMKFISTAKSEGATILCGGSRPEHLKKGYYIEPTIITDITTSMQIWKEEVFGPVICVKTFKTEDEAIELANDTEYGLAGAVFSKDLERCERVTKALEVGAVWVNCSQPCFVHAPWGGVKRSGFGRELGEWGIENYLNIKQVTSDISDEPWGWYKSP

SEQ ID NO: 11035 - protein, 624 aa, Zea mays
AHTPDAFAPRIPLAGGRLYQPGRCWEDVFDAISNARHLIYITGWSVYTEITLLRDGSRPRPGGEATLGELLKRKASEGVRVLMLVWDDRTSVESLGMKWGFMSTHDAETAEYFRGSGVHCVLCPRNPDAGSSAVMGAQIAYMITHHQKIVVVDHEMPAKRSDRRRILSFVGGLDLCDGRYDTQFHSLFRTLDTAHHKDFHQPNLAGASIDNGGPREPWHDIHSKIEGPAAWDVLYNFEQRWRKQGGGIDLLVNLKAMADLIIPPSPVMFPEDQDSWNVQLFRSIDGGACFGFPSTPEAAAQSGLVSGKNNVLDRSIHDAYIHAIRRAKHFIYIENQYFLGSSFAWKADGIKPEEIEALHLVPRELSLKIVSKIEAGEHFAVYVVLPMWPEGPPASGSIQGILDWQRRTMEMMYNDISVALDAKRIDRDPRDYLTFFCLGNREVKMDGEYEPSGRPLDGTDYARAQNARRFMIYVHSKMMIVDDEYIIVGSANINQRSMDGGRDSEIAMGAYQPCHLNTKGQVARGQVHGFRMSLWYEHLGMLHDDFLNPGSLECVRRVNQMADRYWDLYAGDSLDADLLGHLLRYPVTVTKEGTVTELPGAKFFPDTQALVLGALSKLPPILTT

SEQ ID NO: 11036 - protein, 479 aa, Agrobacterium tumefaciens str. C58
MSLKTAPVIVWFRKDLRLSDNLALLAAVEHGGPVIPVYIREKSAGPLGGAQEWWLHHSLAALSSSLEKAGGRLVLASGDAERILRDLISETGADTVVWNRRYDPTGMATDKALKQKLRDDGLTVRSFSGQLLHEPSRLQTKSGGPYRVYTPFWRALEGSDEPHAPADPPKSLTAPKVWPKSEKLSNWKLLPTKPDWAKDFSDIWTPGETGALDKLDDFIDGALKGYEEGRDFPAKPATSLLSPHLAAGEISPAAVWHATKGLSRHIASNDISRFRKEIVWREFCYHLLFHFPELGEKNWNDSFDAFSWRDDEKSFKAWTRGMTGYPIVDAGMRQLWQHGTMHNRVRMIVASFLIKHLLIDWRKGEKWFRDTLVDADPASNAANWQWVAGSGADASPFFRIFNPILQGEKFDGDGDYVRRFVPELEKLERKYIHKPFEAPKDALKKAGVELGKTYPLPIVDHGKARERALAAYAAVKKTT

SEQ ID NO: 11037 - protein, 365 aa, Triticum aestivum
  misc_feature (96)..(96): Xaa can be any naturally occurring amino acid
  misc_feature (113)..(113): Xaa can be any naturally occurring amino acid
  misc_feature (151)..(151): Xaa can be any naturally occurring amino acid
HVYRPLGLGFDLSTTPPSSFPFPVALPPPPHILDSPFSWRPRRRRRRGGRSCRRPGRGGGGGRGRGGGGRRGRGQEPRAQGGGAGEGITDRRIRVXPTDLYHLFHLGHARSLXEQAKKSLTNSYLVVGCYNDELTQQNKGRAIITEDERYXSLQAICKWVDEVIPDAPWVVTEEFLNKHNIDFVAHDSLPYHDASGASNDVYEFVKKLGKFKETKRTEGISTSDIIMRIVKDYNEYVMRNLARGYSRNDLGVSYVKEKRLRVNMGLKTLRDKVKQHQEKVGEKWSTVAKLQEEWVENADRWVVGFLEKFEEGCHSMGTAIKERIQERLKEAQSRDFSLLQYDSDDFDDFEEEDDEVAKDAKYVKE

SEQ ID NO: 11038 - protein, 166 aa, Triticum aestivum
  misc_feature (28)..(28): Xaa can be any naturally occurring amino acid
  misc_feature (98)..(98): Xaa can be any naturally occurring amino acid
ATSVAPFQGLKSTAALPVSRRSNGASLXSVSNGGRIRCMQVWPIEGIKKFETLSYLPPLSTEPLLKQVDYLIRSKWVPCLEFSKVGFIFREHNASPGXYDGRYWTMWKLPMFGCTDATQVINEVEEVKKEYPDAYVRIIGFDNMRQVQCVSFIAFKPPGCEESGKA

SEQ ID NO: 11039 - protein, 441 aa, Arabidopsis thaliana [sequence omitted]

SEQ ID NO: 11040 - protein, 252 aa, Triticum aestivum
MMGYQKGVDIEAGTSGGGTGTTAPTRGLYPGMTESPELRWALIRKIYVILSLQLLLTAVVAAVVVKVRAIPHFFVSSSAGLGLYIFLIIFPFIVLCPLYFYRQKHPVNLLLLGVFTVAISFAVGMTCAFTSGKVILEAAILTTVVVFSLTAYTFWAAKRGQDFSFLGPFLFASLIMLLVFGFIQILFPMGKLSHMIYGALAALIFSGYIVYDTDNIIKRYTYDEYVWAAVSLYLDVINLFLALLTLFRAGDS

SEQ ID NO: 11041 - protein, 494 aa, Mycobacterium bovis AF2122/97
MLEACQAIGVTAALGEPGEHSLPASTPITGDVLFSIAPTTPEQADHAIAAAAATFTAWRSTPAPVRGALVARLGELLTAHQQDLATLVTVEVGKITAEARGEVQEMIDVCQFSVGLSRQLYGRTIASERAGHRLLETWHPLGVVGVITAFNFPVAVWAWNTAVALVCGDTVVWKPSELTPLTALACQALLSRAAADVGAPAAVGGLLLGGAERGAQLVDDPRVALLSATGSVRMGQQVGPRVARRFGRVLLELGGNNAAIVAPSADLELAVRCIVFAAAGTAGQRCTSLRRLIVHRSVADDVVARVVGAYRQLAIGDPSAPDTLVGPLIHEAAYRDMVAALERARTDGGEVIGGDRREVGSPGAYYVAPAVVRMPSQTAIVATETFAPILYVLTYDDLDEAIALNNAVPQGLSSSIFTTDLREAEHFLDQSDCGIANVNIGTSGAEIGGAFGGEKQTGGGRESGSDAWKAYMRRATNTVNYSSELPLAQGVKFG

SEQ ID NO: 11042 - protein, 133 aa, Glycine max
  misc_feature (44)..(44): Xaa can be any naturally occurring amino acid
  misc_feature (123)..(123): Xaa can be any naturally occurring amino acid
MGRLNQMPSTIVKEKPRIQAKVTEEQAWRNYERIRLTKRPYTAXRDEVPLRGNLKQTYATNETAKKLWRLLKNHPANGTTLRTLGALEPAQVTQRAKHWDTNYASGWQRSATHTTSNEPGPDXLAEHPNDTGP

SEQ ID NO: 11043 - protein, 114 aa, Nicotiana tabacum
MEMVSKIACFVVLCMVVVAPHAEALTCGQVQSSLAPCVPYLLGRGPLGGCCGGVKRLLGAARTPADRKTACNCLKSAANTFKGIDMGNAARLPGTCGVNIPYKISPSTDCSKVQ

SEQ ID NO: 11044 - protein, 308 aa, Zea mays
MDGGRPEMRRTMTLSEQLASTPDPAIRDFLKIPQDADVGGILHDEDSPSAVDAQGPRAGRTSGWKPLRDRLRLRRAAGAWQTPPNKPGAAAAHAPTNSGNLSNRYNYNPGEAAAAFSRTFSRAPSLRAPSLRATPTFSRVASTRLGPASSRSSSRRPATYDFRDVDERRHDADADDGGEEEDDEGEGDDDDDEGDEEDEKEEAPAAQMSLMALLEQTDSQWDDDEDEEESGGGGGARKKGEGDDDEDDGEGREEEMVHVCCVCMVRHKGAAFIPCGHTFCRLCSRELWVSRGNCPLCNGFIQEILDIF

SEQ ID NO: 11045 - protein, 262 aa, Triticum aestivum
RSARRSPRGSRRWRWSRPPRPRRPRRRWPPAGGGVEDKYGEDRATEELPVTPWAFSVASGYTLLRDPHHNKGLAFTERERDAHYLRGLLPPGVVSQDLQVKKIMHNLRQYKVPLQRYVAMMDLQERNERLFYKLLIDNVEELLPVVYTPTVGEACQKYGSIFRRPQGLYVSLRDKGKVIDVLRNWPERNIQVIVVTDGERILGLGDLGFRPTACLPITIDVGTNNEQLLNDEFYIGLRQRLATGEEYHELTEEFMVAVKQIY

SEQ ID NO: 11046 - protein, 338 aa, Heterocapsa triquetra
PAVSPPTPARTSAMGNACSEGCFAGFASPDPRVKELKALEGDLKNLINTLNCNPILVRLAWHDSGTFDQRIQGWPQCGGANGAIRFDPEMNFGANAGLAKAKGYLDKFVEKYPSLSWADMIQMASAVSIEMAGGPKIPMKYGRVAVTSPDQCVGSASREGFEGNAGLPDPIPGGNGKFPCGATGPAAHLRNVFTKKMGFTDQEIVALSGAHTIGRAYKERSGTCPFGYMDASASKYSKSSCIVRKDGKAGIGMPGGAAWTKNWLTFDNSYFTKFKEAMEDDHLLWYPTDECLHQDPAFRPIFMKYAESQAAFFEDYAKAHKKLSELGAKFDPPNGITI

SEQ ID NO: 11047 - protein, 198 aa, Zea mays
  misc_feature (171)..(171): Xaa can be any naturally occurring amino acid
MATSFQGTTTKCTACDKTVYLVDKLTADNRVYHKACFRCHHCKGTLKLANYNSFEGVLYCRPHFDQLFKRTGSLDKSFQGTPKVVKPERNVGNENATKVSSAFAGTREKCVGCSKTVYPIERVTVNNTMYHKSCFKCCHGGCTISPSNYIAHEGKLYCKHHHVQLIKEKGXTSASSRMTTRRHRRLGRWRTTKKKSID

SEQ ID NO: 11048 - protein, 505 aa, Oryza sativa (japonica cultivar-group)
MEREAWLLCAALAAAMVYYYYYYLACTTRRAQRRLPPGPTPLPVIGNVLSLSGDMHHELARLAREQYGPVMTLKLGLFTAVVVSSPDAAREAFTKHDRRLAARTVPDISRARGLTGRSMIWLPSSDPRWKTLRSAVATHFFSPRSLAAARGVRERKVRDIVNYFAGHAAEVIDVGEAVYGGVINIVSNAFFSADVVDVGKESAHGLRETLEDIILAIAKPNVSDLFPFLRRLDLQGWRRWAEKRYDKVFGILDDKINSRLADADADASTKKHGDFLDSLLELMSAGKIACDDVTTVMFDAFGAGTDTISNTVVWAMAELLRNPSIMAKVRAEMEDVLAGKKTIEENDTEKLPYLRAVIKEAMRLHPVAPILLPHRAAEDGVEIGGYAVPKGSTVIFNVWTIMRDPAAWERPEEFMPERFLQRAEVDFRGKDFEFIPFGAGRRLCPGLPMTERVVPFILASLLHAFEWRLPVGVAAETLDLSEKFTTVNVLVTPLKAIPILASHQI

SEQ ID NO: 11049 - protein, 199 aa, Magnaporthe grisea 70-15
MAAPGVQSLKCVVTGDGAVGKTCLLISYTTNAFPGEYIPTVFDNYSASVMVDGKPISLGLWDTAGQEDYDRLRPLSYPQTDVFLICFSIVSPPSFDNVKAKWYPEIDHHAPNVPIILVGTKLDLREDPSTLESLRSKRMEPVSYDQALICAKEIRAHKYLECSALTQRNLKSVFDEAIRAVLNPRPQPAKVKKSKCTIL

SEQ ID NO: 11050 - protein, 300 aa, Isochrysis galbana
KPHVAMDDQMYVNAVKSDIRKALVNQKGNSCPLAVRLAWHASGTYSKHDDTGGSYGATMRFPPEKEDGANAGLDIERDILQEVKRQHPDLSYADIWTLAGAHAIEIAGGPPIEHKLGRTDAQDGSACPAVGRLPDASQGAEHLREVFYRMGFNDEDIVALSGAHTLGRCHKTRSGFDGPWTHEPLKFDNSYFKNLLDLEWKPRQWDGPLQYEDPSHTLMMLPTDLALKTDPKFKEYVVAFAKSETVFRSAFKRAYEQLLCLGCPAHVVPSAAPVAMQSREEADGSLEFAQAARAAGGDPA

SEQ ID NO: 11051 - protein, 431 aa, Methanopyrus kandleri AV19
MAAESIAKAVHDVLATWGAQGPGAIFFLVWAAVLVVGMQLGFMFLEAGQVRTKNVVSVLMKNLLDLSLGGIVFIFFGFALAFPDYAQSIGKWIATMFTANPWSADPMKAADPYNLAYCFFQFAFCATAATIVSGAVAERINFKACLVMTVLITGLLYPIFVLWTWGGGWMGGDTGLFAKVFGQPYHDFAGSTVVHAIGGFLAMAAAYLLGPRIGRFKNGKPVPIPGHNIPQAFLGALFLAITWYGFNVGSSAVLYDPTNESWISSLVATLAMCGGAAAAAFTTRFDPLWAANGLIAGLVAICAGCDIMSPFGALLTGIVAGLIIKPAFRLLEKLEIDDVVAACPVHGFAGVWGAIAAGIFGAEALGGAGGVSLAAQIVGALVCIAWALGSGFATFYVIDKVIGLRATEEEEKGLDETEFGVSAYPYMETRD

SEQ ID NO: 11052 - protein, 129 aa, Brassica napus
MEHGSFTNDSFASFTLAEEDHTLANAVRFMLNQDPRVTFAGYSIPHPSLECVNVRVQTTGDPAREVLKDACQELMLMNRHVRSVFDKAVSEFKVEQARLAAEEEKNRKAEEEELKKQRDLLASMDIESD

SEQ ID NO: 11053 - protein, 389 aa, Sulfolobus acidocaldarius
MWIKGKAYYEGEIKEICINFDRSIKEIRANCKPDMTFTNEELILPASVDLHVHVRGAQLSYKETVATATSEAVYGGVGVIVDMPNTVPYINTPERIKERLREFQLYSRTDYGIYSGVSKEVEEIDKLPIAGYKIYPEDLEKEETRYVLEKSKKLKILHPEMPFVSKIERSLRRSYWMETAAINLVKGNMHITHITNFETLQLAKSMGFTTDITAHHLVVDGERDCISKVNPPIRDYVTRLKLFLKGLFEVDCIASDHAPHSKEEKRMNFDLCPPGIAGVSFSTPYIYSLMFKGLISIDRAVSLLSGNPSRILNIPTGKIKEGYRANFTVIKRENWRYTTKFSKVTETPMDGFSLDAKVTNVIVEGKLAFDGENVYPIRGVNIFDSSSRS

SEQ ID NO: 11054 - protein, 136 aa, Glycine max
  misc_feature (5)..(6): Xaa can be any naturally occurring amino acid
  misc_feature (20)..(22): Xaa can be any naturally occurring amino acid
SQILXXNSGVFKDIVLKRNXXXGPVLVYPMNRNKWYDRMSASIPDEEVFYTVGFLHSSGFDTWKAYDAQNSEILEFCRDAGIKVKQYLPNHSTQEDWTNHFGAKWMKFLERKHQFDPRMILSPGQKIFHKKLQPVF

SEQ ID NO: 11055 - protein, 483 aa, Burkholderia cepacia R18194
MDEQLITGRLLIDGELVDSETGEWAASINPATEAVIGRAPAGSRRDVARAVDAAQRAWPAWAERTGEERGELLRGFGERLLERAEELSRIEVLDSGNTYVPTLASMHETVRSLRYYAGLVHGLHGETIPATGRNLHMTVYEPYGVVGRIAAFNHPAMFSAARTASALVTGNTVVVKPPETSPLSVLVLGEVARDTLPAGVFNIVNGTGAEVGDALVRHPDVKRLALIGSVATGQAIQRSAAEVGVKHVTLELGGKNPMIVFPDADPDAAADSAVRGMNFSWQGQSCGSNSRLLVHDDIYDDVLARVVERVAAIRVGDPMSPDTGMGPINSRKSYDHVMSFLDPAQTHGARLMTGGRRPPGHAFEKGFWVEPTVYADVTPGMRLWREEVFGPILSVARWRDVDEVVAMANDTEYGLSAAIWTNDIRQALNTARRIRAGSVFVNGSNTHFLGVPWGGFKNSGVDREEGIEEMYSYVEKKVINVML

SEQ ID NO: 11056 - protein, 411 aa, Rickettsia sp. DaE100R
DSEFAELKIRGKIFKLPILKASIGEDVIDISRVSAEADCFTYDPGFMSTASCQSTITYIDGDKGILRHRGYDIKDLAEKSDFLEVAYLLIYGELPSGEQYNNFTKQVAHHSLVNERLHYLFQTFCNSSHPMAIMLAAVGSLSAFYPDLLNFKEADYELTAIRMIAKIPTIAAMSYKYSIGQPFIYPDNSLDFTENFLHMMFATPCTKYTVNPIIKNALNKIFILHADHEQNASTSTVRIAGSSGANPFACISTGIASLWGPAHGGANEAVINMLKEIGSSEYIPKYIAKAKDKNDPFRLMGFGHRVYKNYDPRAVVLKETCKEVLKELGQLDNNPLLQIAIELEAIALKDEYFIERKLYPNVDFYSGIIYKAMGIPSQMFTVLFAIARTVGWMAQWKEMHEDPEQKISRPR

SEQ ID NO: 11057 - protein, 300 aa, Triticum aestivum
  misc_feature (251)..(251): Xaa can be any naturally occurring amino acid
LQYEVLQWCICRLEAWFATDVDNISLKNWDQEHVLTGGHGLMVNGYDPVIKALSRDLDVHLNHRVTKIIQRYNKVIVCVEDGTSFVADAAIITVPLGVLKANIIKFEPELPDWKLSAISDLGVGLENKIALRFNTIFWPNVEVLGRVAQTSNACGYFLNLHKATGHPVLVCMVAGRFAYEMEKLSDEESVNFVMSQLRRMLPGATEPVQYLVSRWGTDPNSLGSYSCDLVGKPADLYERFCAPVGNLFFAXGEAACIDHSGSVHGAYSSGIGAAEDCRKAPLDQLGISDLFKSGRCDRRL

SEQ ID NO: 11058 - protein, 80 aa, Triticum aestivum; identical to SEQ ID NO: 310

SEQ ID NO: 11059 - protein, 390 aa, Zea mays
  misc_feature (20)..(20): Xaa can be any naturally occurring amino acid
  misc_feature (52)..(52): Xaa can be any naturally occurring amino acid
  misc_feature (55)..(55): Xaa can be any naturally occurring amino acid
  misc_feature (101)..(101): Xaa can be any naturally occurring amino acid
  misc_feature (114)..(114): Xaa can be any naturally occurring amino acid
  misc_feature (154)..(154): Xaa can be any naturally occurring amino acid
  misc_feature (186)..(186): Xaa can be any naturally occurring amino acid
  misc_feature (340)..(340): Xaa can be any naturally occurring amino acid
MAGGAGNGSNEAVQAKGSGXDGSHAKPVSPRWVKARSAAPESYASCHTTMIXGWXTKPRSHCGKATKVQYYNNPMWPGEAHSLKVENILYQGKSPYQEVLXVFESSTYGKVLVXLDGIVQLTDKDECAYQEMITHLPLCSIPSPKKVLVIGGGXMGGVLREISRHSSVESIDICEIDQLVIDICKXFFPHLSVGFEDPRVQLHVGDAVEFLRNAPEGTYDAIIVDSSDPIGPAQELVEKPFFETIARALRPGGVLCNQAESMWLHTHLIQDMLSICRETFKGSVRYAWASVPTYPSGVIGFLLCAKDGPPVNFLTPVNPIEEVEGATKAGREIRFYNSEXHMAAFVLPTFAKRELEAYCASTETEQAEEVAATAPQKLTAAPKRGITTAS

SEQ ID NO: 11060 - protein, 169 aa, Brassica napus
MDTVIGSIDACNPTTGDICRPPNGAVSTVQNSPPAHSTTISPCDATLGRYLARRLVEIGVTDVFSVPGDFNLTLLDHLIAEPSLKLIGCCNELNAGYAADGYARSRGVGACVVTFTVGGLSVLNAIAGAYSENLPLICIVGGPNSNDYGTSRILHHTIGLPDFTQELRC

SEQ ID NO: 11061 - protein, 113 aa, Rickettsia sp. Hf332
ANEAVINMLKEIGSSEYITKYIAKAKDKNDPFRLMGFGHRVYKNYDPRAAVLKETCKEVLKELGQLDNNPLLQIAIELEAIALKDEYFIERKLYPNVDFYSGIIYNAMGIPTQ

SEQ ID NO: 11062 - protein, 510 aa, Sinorhizobium meliloti
MNIAAKKIDVASEAAALLDKMGVAKDLYTGGDMPSFSPVTGEKIASLKTVSAAEAAGKIEKADEAFRAWRLVPAPKRGELVRLLGEELRAFKADLGRLVSIEAGKIPSEGLGEVQEMIDICDFAVGLSRQLYGLTIATERPGHRMMETWHPLGVVGIISAFNFPVAVWSWNAALALVCGDAVVWKPSEKTPLTALACQAILERAIARFGDAPEGLSQVLIGDRAIGEVLVDHPKVPLVSATGSTRMGREVGPRLAKRFARAILELGGNNAGIVCPSADLDMALRAIAFGAMGTAGQRCTTLRRLFVHESVYDQLVPRLKKAYQSVSVGNPLESAALVGPLVDKAAFDGMQKAIAEAKNHGGAVTGGERVELGHENGYYVKPALVEMPKQEGPVLEETFAPILYVMKYSDFDAVLAEHNAVAAGLSSSIFTRDMQESERFLAADGSDCGIANVNIGTSGAEIGGAFGGEKETGGGRESGSDAWKAYMRRATNTVNYSKALPLAQGVSFDIE

SEQ ID NO: 11063 - protein, 296 aa, Saccharomyces cerevisiae
MITTPLVHVASVEKGRSYEDFQKVYNAIALKLREDDEYDNYIGYGPVLVRLAWHISGTWDKHDNTGGSYGGTYRFKKEFNDPSNAGLQNGFKFLEPIHKEFPWISSGDLFSLGGVTAVQEMQGPKIPWRCGRVDTPEDTTPDNGRLPDADKDAGYVRTFFQRLNMNDREVVALMGAHALGKTHLKNSGYEGPGGAANNVFTNEFYLNLLNEDWKLEKNDANNEQWDSKSGYMMLPTDYSLIQDPKYLSIVKEYANDQDKFFKDFSKAFEKLLENGITFPKDAPSPFIFKTLEEQGL

SEQ ID NO: 11064 - protein, 201 aa, Neisseria gonorrhoeae
MMTLYSGITCPFSHRCRFVLYEKGMDFEIKDIDIYNKPEDLAVMNPYNQVPVLVERDLVLHESNIINEYIDERFPHPQLMPGDPVMRGRGRLVLYRMEKELFNHVQVLENPAAANKEQAKAREAIGNGLTMLSPSFSKSKYILGEDFSMIDVALAPLLWRLDHYDVKLGKSAAPLLKYAERIFQREAFIEALTPAEKAMRK

SEQ ID NO: 11065 - protein, 445 aa, Sinorhizobium meliloti
MNAHNKPNAPVLDSYWMPFTANRQFKAAPRLLAAAEGMHYTSVDGRTVLDGTAGLWCVNAGHGRRQIAAAVERQLSTMDFAPSFQMGHPIAFDFAERLAEIAPGPAGAKLDRVFFTGSGSESVDTALKMALAYQRSIGQGTRTRLIGRERGYHGVGFGGISVGGIVNNRRVFPQLPGSDHLRHTHDPAKNAFVKGQPEHGAELADDLERLVALHGAETIAACIVEPVAGSTGVLIPPKGYLERLRAICDKHGILLIFDEVITGFGRLGAAFATDYFGVTPDIVTTAKGLTNGAIPMGAVFASRKVHDALMHGPEGQIELFHGYTYSGHPAACAAGIATLDIYRDEGLMTRAAEIEGDWHEAMHSMKGLPHVIDIRTIGLIAGIELQSRDGAPGARAYDVFVDCFERGLLIRVTGDIIAFSPPLIAEKQHFGEIVSILADALKRVK

SEQ ID NO: 11066 - protein, 296 aa, Saccharomyces cerevisiae
MIVEKLVHVASVEKGRSYEDFQKVYNAIALKLREDDEYDNYIGYGPVLVRLAWHISGTWDKHDNTGGSYGGTYRFKKEFNDPSNAGLQNGFKFLEPIHKEFPWISSGDLFSLGGVTAVQEMQGPKIPWRCGRVDTPEDTTPDNGRLPDADKDAGYVRTFFQRLNMNDREVVALMGAHALGKTHLKNSGYEGPQGAANNVFTNEFYLNLLNEDWKLEKNDANNEQWDSKSGYMMLPTDYSLIQDPKYLSIVKEYANDQDKFFKDFSKAFEKLLENGITFPKDAPSPFIFKTLEEQGL

SEQ ID NO: 11067 - protein, 182 aa, Novosphingobium aromaticivorans DSM 12444
MPDTLAAIPLTRIDGTADSLANHAGKVLLVVNVASKCGLTPQYEGLEALYKARKDEGLEVLGFPANDFGAQEPGSHEEIAEFCKLNYGVSFPLFAKADVTGPGKQPLYAALTEAAPTKQGPAQEFRDRLKGYGMTPTEDPEVLWNFEKFVIGRDGEVAARFAPGVTPDDPALLAAIDAELAK

SEQ ID NO: 11068 - protein, 396 aa, Wolinella succinogenes
MRIREGKIVEIQKSILPEKGEEVVLAEGLSLLPAMVDLNVRVANDSLTGKNLATLAKKAAKGGVGSLALMPDCSPSLDNEAAIELLNSYKGELPASIFPIASATKKEDGKLSDLSILHKMGCRGIAIESSLDGNLSRRVCEYSLMMKAPIFCRCEDVSLRGSGVMNDGYLSSRMGLPGIPSLSETKEVAKMAETAIFMRTPVLFQALANERSLRIIERAKEENPSLFAEVSIHHLAITEDFCSGFNTGAKIRPPLKSESTRKKLLQLLKEGVVDVVTSLQSEHSLSKKDVAFEEAAFGVDNIENHFSLCYTYLIKQGRLSMSDLSRVTAKRAAEILGLESKGYVGVGADADLILVDIKSSKVVEDNFSPYYNSILYGEVERTIIAGETVYKREKKG

SEQ ID NO: 11069 - protein, 416 aa, Wolbachia endosymbiont of Drosophila melanogaster
MDKKVLLELSNGLKIELPVLSGTTGPDVLNIKDLYKMTGLFTYDPGFVSTASCSSTITFIDGDEGVLKYRGHNIADLAENNNFTAVIYLLLYGELPSSEQHKKFLLKIQESSKVSEQVTNVIKAFPKTAHPMSILVACFASLSASYHEKHGNNVNGEDLDFGISAIAQVSTIIAMIYRHINNQEFINANNELSYSENFLKMIFGDAVDNDKSALFAKALDKIFTLHADHEQNASTAAVRLVGSAGSNLFASLSAGVATLWGPAHGGANEAVINMLKEIEQSGDIDKFIEKAKDDKDPFKLMGFGHRVYKNYDPRARILEGACHEVLSKLEQNNELLKIAKKLEEIALKDEYFIVRKLYPNVDFYSGIIMNAIDIPSNMFTPIFALARTTGWVTQWYEMINDKETKICRPRQLYFGK

SEQ ID NO: 11070 - protein, 512 aa, Shewanella oneidensis MR-1
MSVNQNRSGKHALMWFRQDLRLTDNQAFTAACDWVRQHHAAKLKAIYIATPSQWHQHDIAPIQLDFIQRHVNLLAQGLVSLGVEFELIQLDSFRDIPAFLTSYCEEHSIGRVFAGQEPEINEQKRDQACVEAGIPLSLSDEHCLLPPGTVLNLSGDMYRVFTPFSRKWREVAAKQAILPLGVPAPLGSILSEPKPLFFKNIGSTYLAASKDIASSKKGFNQTAPNPLISSEQWAAGEGQAKRLLNQFIQQKVQDYKQDRDFPAIDGTSVISPYLAIGVLSPRQCVAALLQRFPEVIVDDTSPGRTWLNELIWREFYRHLLVAFPDLSKGNNFNRQADHVLWRNNQSEFLAWCEGKTGYPIVDAAMRQLNQTGWMHNRLRMVVASFLTKHLLIDWRWGERYFRQHLIDGDLAANNGGWQWSAGCGCDAQPYFRIFNPMSQSEKFDPDGRFIRKYLPELASWGVTRLHQPNQQKMPSLFEAPLFASQADYPNAIVEHNAARARALTVLGVLKKA

SEQ ID NO: 11071 - protein, 478 aa, Desulfitobacterium hafniense DCB-2
MTVIRYDNQMIVIDAGLAFPEDEMLGIDIVIPDYSYLLEHKDMVQGILVTHGHEDHIGALPYLLKDLDAPIFATRLTLGLIQSKLKEGNLDNIKATVVRPRDTVKLGVFKVEFLSVNHSIPDAVALAIHTPLGTIVHTGDFKVDHTPVMGEKIDIHKFAELGDKGVLCLMSDSTNVERPGFTMSERSVGHMFEEAFNSAKDRIIIASFATNVHRLQQVITAAHHTNRKVAVVGRSMVNTVAIASELGYLDIPEDTLVDVDEVVNLPGNQACILTTGSQGEPMSALTRMAMSDHRRIEIQPGDTVIISANPIPGNEKSVSKTIDLLFKLGANVIYESYQGMHVSGHASQEELKLMLNMIRPQYFIPVHGEYRMLIKHAKLAEQMGISRENTFVADNGTIVEFTRHGASIAGKVPAGKVLIDGLGVGDVGNIVLRDRKQLSQDGILIVVMTISRSSGAIVAGPDVVTRGFVYVRESESML

SEQ ID NO: 11072 - protein, 63 aa, Zea mays
  misc_feature (45)..(45): Xaa can be any naturally occurring amino acid
GQVGVNRLQYDQLRAPVGRVFLTGEHTSELYNGYVHGDYLSGIDXDAILINRTQKKMCKYNVH

SEQ ID NO: 11073 - protein, 116 aa, Triticum aestivum
  misc_feature (29)..(29): Xaa can be any naturally occurring amino acid
  misc_feature (33)..(33): Xaa can be any naturally occurring amino acid
  misc_feature (35)..(37): Xaa can be any naturally occurring amino acid
  misc_feature (87)..(87): Xaa can be any naturally occurring amino acid
MAPTVMASSATSVAPFQGLKSTAGLPVSXRFSXRXXXSLGSVSNGGRIRCMQVWPIEGIKKFETLSYLPPLSTEGPLLKQGSTTPDXRSQWVPCLEFSKGGVHSSREHNAFSGYYD

SEQ ID NO: 11074 - protein, 57 aa, Glycine max
MAGDSAATCIDILLAIILPPLGVFLKYGCQVEFWICLVLTLFGYIPGIIYAVYAITK

SEQ ID NO: 11075 - protein, 177 aa, Triticum aestivum
  misc_feature (101)..(101): Xaa can be any naturally occurring amino acid
  misc_feature (140)..(140): Xaa can be any naturally occurring amino acid
MAPTVMASSATSVAPFQGLKSTAGLPVSRRSNGASLGSVSNGGRIRCMQVWPIEGIKKFETLSYLPPLSTEALLKQVDYLIRSKWVPCLEFSKVGFIFREXHTHPPGYYDGRYWTMWKLPMFGCTDATQVINEVEEVKKXEYPDAYVRIIGFDNMRQVQCVSFIAFKPPGCEESGKA

SEQ ID NO: 11076 - protein, 294 aa, Saccharomyces cerevisiae
MKTLVHVASVEKGRSYEDFQKVYNAIALKLREDDEYDNYIGYGPVLVRLAWHISGTWDKHDNTGGSYGGTYRFKKEFNDPSNAGLQNGFKFLEPIHKEFPWISSGDLFSLGGVTAVQEMQGPKIPWRCGRVDTPEDTTPDNGRLPDADKDAGYVRTFFQRLNMNDREVVALMGAHALGKTHLKNSGYEGPGGAANNVFTNEFYLNLLNEDWKLEKNDANNEQWDSKSGYMMLPTDYSLIQDPKYLSIVKEYANDQDKFFKDFSKAFEKLLENGITFPKDAPSPFIFKTLEEQGL

SEQ ID NO: 11077 - protein, 359 aa, Kluyveromyces marxianus
MSKNIVVLPGDHVGTEITNEAIKVLNAISEARPSIKFNFEHHLIGGAAIDATGVPLPDEASKKADAVLLGAVGGPKWGTGSVRPEQGLLKIRKELGLYANLRPCNFASDSLLDLSPLKPEYAKGTDFVVVRELVGGIYFGERKEDEGDGVAWDSEKYSVPEVQRITRMAAFLALQHNPPLPIWSLDKANVLASSRLWRKTVEETIKNEFPQLTVQHQLIDSAAMILVKSPTKLNGIVITNNMFGDIISDEASVIPGSLGLLPSASLASLPDTNKAFGLYEPCHGSAPDLPANKVNPIATILSAAMMLKLSLDLVEEGRAVEEAVRKVLDSGIRTGDLGGSNSTTEVGDAVAKAVKEILA

SEQ ID NO: 11078 - protein, 468 aa, Zea mays
TASAVLCAPRTRLVGSSIQLPPDVDQLPILTTKVKRRVGKYELGRTIGEGTFAKVRFAKNTETGEPVAVKILDKEKVLRHKMAEQIKREISTMKLIKHPNVVRIYEVMGSKTKVYIVLEYVTGGELFDTIANQGRMREGEARSYFQQLINAVDYCHSRGVYHRDLKPENLLLDSYGNLNVSDFGLSALSQQIKDDGLLHTTCGTPNYVAPEVLEDQGYDGAMADLWSCGVILFVLLAGYLPFEDSNLMTLYKKISNAEYTFPPWTSFPAKRLLTRILDPNPMTRITIPEILEDEWFKKGYKRPEFDEKYDTPLDDVDAVFNDSEEHHVTEKKEEEPVALNAFELISRSAGLNLGNLFDSEQEFKRETRFTSKCPPKEIIRKIEEAAKPLGFGVQKKNYKLRLEKVKAGRKGNLNVATEILQVAPSLHMVQVRKAKGDTLEFQKFYKNLSKTLKDVVWKSEDLQMRAAS

SEQ ID NO: 11079 - protein, 142 aa, Saccharomyces cerevisiae
MADQVPVTTQLPPIKPEHEVPLDAGGSPVGNMGTNSNNNNELGDVFDRIKTHFPPAKVKKIMQTDEDIGKVSQATPVIAGRSLEFFIALLVKKSGEMARGQGTKRITAEILKKTILNDEKFDFLREGLCVEEGQTQPEEESA

SEQ ID NO: 11080 - protein, 373 aa, Mycobacterium avium subsp. paratuberculosis str. k10
MTKPLTDTAPVDPGAQRGSMPLTNRIQGAVTSVGVKVIPWIPTAVRRGLVRGRSVIIDGNTLDPTLQLMLSGLRAVGIDGLVVDDDPELSRAQMHESTVGFPGPQIHVDVAELALPGPAGDIPARHYRPAGGETQAPLLVFYHGGGWSIGDLDTHDSLCRLTCRDAGIHVLSIDYRLAPEHPAPAAIDDAYAAFTWAHEHAGELGAIPGRVAVGGDSAGGNLAAVVSQLARDAGGPAPVLQWLIYPRTDFTARTRSLSLFSRGFLLTKRDIDWFESQYLRNSRLDRTDPRVSPALAESLAGLAPALIAVAGFDPLRDEGQSYAEALRAAGTPVDLRYLGSLTHGFANLFQLGGDSMVATSELISALRAHLSRV

SEQ ID NO: 11081 - protein, 281 aa, Mycobacterium avium subsp. paratuberculosis str. k10
MTGESGSAAPSIALNDENTMPVLGLGVAELSDDETERAVSAALEVGCRLIDTAAAYGNEAAVGRAIAASGIPRAELFVTTKLATSDQGFKGAMDACEASLERLGLDYVDLYLIHWPAPALGTYVNSFGGMIQSRGNGHARSIGVSNFTEEYLTTVIDLTFVTPAVNQIELHPLLNQEALRKTNAEHNVVTQSYTPLALGKLNDHPTVNSVAAEYGKTASQVLLRWNLQLSNAVIFRSANAEHIASDFDVFDFELAAEHMDAINALNDGTRLRPDPDTYEGS

SEQ ID NO: 11082 - protein, 384 aa, Corynebacterium glutamicum
MTSVIKKKAKFNTLSVSGVKKLTDDSVEVSFDVPEELQDDYDYIPGQYVALRATVDGEELRRSYSICDIPNKGTIRVGIKKDLGGKFSTWANEELQLGDVIDVMNPQGAFTSKIHVTSLNDAQNLVDSELGQVENPNFVAIAAGSGITPIMSIAQAVLKSLPKATFQLVYSNKGGADVMFADKIGDLKDKYPARFAVHHVLTREQRVNPLFSGRIDDEKMELLLDQVLRPDLVDEWFLCGPFELVQMCRDSLKERDIDEKRIRFELFSTGDPKSAPGGNAGRPVIADPKGKNISIQFQLDGLSGTIESPVSAKETVLNAALRARPDVPFACAGGVCGTCRAKVVEGDYEMDENYALEPDEVAAGYVLTCQTRPTGDCITVDYDA

SEQ ID NO: 11083 - protein, 511 aa, Saccharomyces cerevisiae
MSKSKTKTDKRNQSSLSRIKLSALHYCMSDAEPSIAYLQDNSAFINNEWHNLVLEKIFPVYNPSTEEDITQVSEKSQHDSTEEDITQVSEKSQHDDDKAVVDISERGRLLNILADLIERDRDILAAIEHLDNGKPFDEAYLLDLASVLKELRYTAGWADKLHGTLRFAITIPTFQDLRFLRYTRHEPVGVCGEIIPWNIPLLMYIWKIGPALAAGNTVVLKPEELTPLTALTVATLIKEAGFPPGVVNVVSGYGPTAGAACLSHKDNDKLAFTGSTLVGKVVMKAAAKSNLKKVTLELGGKSPMIVFIDADLDWAVENAHFGVFFNQGQCCIAQSRITVHESIYDEIVERDLEKAKKQVLGNPFESDTRYGPQILKIEFDSIPRLINSAKAEGAKVLCGGGRDDSCVGYYIQPTVFADVTDEMRIAKEEIFGPVITISRFKSVDEAIKRVDNTKYGLAAYVFTKDKAIRISAALKAGTVWVNCVHVASYQIPFGGNKNSGMGRELGEYGLE

SEQ ID NO: 11084 - protein, 355 aa, Azoarcus sp. CIB
MIPEFIDTWQMTEPGKLQKTRVPMPELQPGDVVVKIAGCGVCHTDLSYFYMGVPTVQKPPLSLGHEISGTVIGGEASMIGKEVIVPAVIPCGECELCKTGRGNRCLSQKMPGNSMGIYGGYSSHIVAQSKYLCVVENRGSTPLEHLAVVADAVTTPYQAAVRADLKKDDLVIVIGAAGGVGSFMVQTAKGMGAKAVIGIDINEEKLTMMKDFGADFVINPKDKSAKDVKELFKGFCKERGLPSNYGWKIFEVTGSKPGQELALSLLSFTGKLVIVGYGTAETNYMLSKLMAFDAEIIGTWGCPPDRYAAVRDMCLDGRIKLGPFVETRPMSQIEQVFDEAHHGKLKRRVILTPDF

SEQ ID NO: 11085 - protein, 506 aa, Oryza sativa (japonica cultivar-group)
MERDAWLLCAALAAATVVYYLACTTSRRAQRRRLPPGPTPLPVIGNVLSLRGNMHHALARLARERYGPVMALKLGLVTAVVVSSPDAAREAFTKHDRRLAARAVPDTSRVRGFADRSMIWLPSSDTRWKTLRGVVATHVFSPRSIAAARGVRERKVRDIVGYFAAHVGEVVDVGEAVYSGVVNLVSNAFFSGDVVDVGEESAHGLREAVEDIILAIAKPNVSDLFPFLRPLDLQGWRRWAEKRYDTVFDILDNITNSRLADASAGNHAGDFLDSLLGLMSYGKIARDDVTTIMFDVFGAGTDTIAITVQWAMAELLRNPSIMAKARTEMEDVLAGKKTIEENDTEKLPYLRAVIKEAMRLHPVAPILLPHQAAEDGVEIGGYAVPKGSTVIFNVWAIMRDPTAWERPDEFMPERFLQRAEVDFRGKDFEFMPFGAGRRLCPGLPMAERVVPFILASLLHAFEWRLPDGMSAEELDVSEKFTTANVLTVPLKAVPILASSASELQAS

SEQ ID NO: 11086 - protein, 497 aa, Bradyrhizobium japonicum USDA 110
MTPTAAARAQHATATLRDRLKDPSLLKEACYIDGAWVGTPVFAVNNPATGVELAKVPQLGADDTTKAVEAAERAFPAWAKHTAKQRSNILRKWFELIIANREDLALILTSEQGKPLSEALGEVDIGAAYIEFFAEEARRVYGETIPTQRPDARLLAIKQPIGVCGAITPWNFPNSMITRKVSPALAAGCTVVLKPANETPLSALALAVLAEKAGIPKGVLNIITGDAPPIGKVLCEHPAVRFVGFTGSTAVGKILYQQASVGVKRLGLELGGNAPFVVFDDADIDAAVEGAIVSKYRNMGQTCVCANRLYAQDKIYDEFVQKLSKKVAVMKIGDGTEAGVTQGPLINLKAVDKVERHIADAVKRGAKVVTGGKRSELGRSFFEPTVLADVKPDSLVAQEETFGPLAPVIRFKDEADVIAMCNASPFGLASYFYSRDLGRVWRVAEALESGMVGVNTGLITTEVAPFGGVKESGLGREGSRHGMEEYVEIKYVMMAGV

SEQ ID NO: 11087 - protein, 334 aa, Bacillus sp. KSM-K16
MSTVRNIALITSGGDAPGLNGAIAAIAQTPDVNLYFYHGGFDGIIEQDPIAISPTTAREAVQQGELLCFSGRSTHMLHEAGQKRVLEKLKQDCIDALIVCGGNGSAQGARSLSAGLPVAVVPMTIDNDIGGSEYTIGHDTAVNAIAESLHRLRQTAANLPGRIFMVETFGGRCGQLPLAAAVAASADIVLLPEYELNIDKFITEVNARSARGKSVIIVVSEGIYLNKRFSAGDQGVSFALARALEESTGKRVRLSILGYTQRAGDPTSYDCLMAKQMGQCAVDALLNGEKAMLVALKEGRVKAIPLTAIEQAPTLAKELLQLAFKENQLIQLEG

SEQ ID NO: 11088 - protein, 193 aa, Nicotiana tabacum
MAFAGTTQKCMACDKTAYLVDKLTADNRIYHKACFRCHHCKGTLKLGNYNSFEGVLYCRPHFDQLFKQTGSLDKSFEGTPKIVKPQKPIDSGKPQVAKVTSMFGGTREKCFGCKKTVYPTEKVSVNGTPYHKSCFKCSHGGCVISPSNYIAHEGRLYCKHHHIQLIKEKGNLSKLEGDHEMNSTTTTEVTAES

SEQ ID NO: 11089 - protein, 442 aa, Acinetobacter sp. ADP1
MLYSIFIAHQESWMVDQFDLEHIWHPYTSMINPLPTFKVKRASGVMIELDDGRQLIDGMSSWWCAIHGYNHPALNQAVKDQLEQMSHIMFGGFTHDPAIELAKILLKITPPSLDKIFYADSGSVAVEVALKMAVQYWTAQGQHQKTNFITTRSGYHGDTWNAMSVCDPVTGMHQIFGASLPNRVFVSAPKSRFDGEWDSSEMDEVEQLIQQHTQLAAFIIEPIVQGAGGMRFYHPEYLRQLKQLCEKYQLLLIFDEIATGFGRTGKLFAWEHAQVEPDIMCIGKGLTGGYMTLSATLTSQHVAEVISRGEAGVFMHGPTFMGNPLACAVALKSTQLLVEQDWQSNIRRIENRLQPLYQLAALAHVADIRTLGAIGVVELKHNVDMKTLQQQFVELGIWIRPFGKLVYVMPPYIISNDELDELIQKMMNVVRQLSCEAQHGIA

SEQ ID NO: 11090 - protein, 450 aa, Triticum aestivum
MSTCAASLAPLLGTAAANATDYLCNQFADTTTAIDSTYLLFSAYLVFAMQLGFAMLCAGSVRAKNTMNIMLTNVLDAAAGALFYYLFGFAFAFGTPSNGFIGKHFFGLRDVPQVGFDYSFFLFQWAFAIAAAGITSGSIAERTQFVAYLIYSAFLTGFVYPVVSHWIWSADGWASASRTSGPLLFNSGVIDFAGSGVVHMVGGVAGLWGALIEGPRIGRFDHAGRAVALRGHSASLVVLGTFLLWFGWYGFNPGSFLTILKSYGPPGSIHGQWSAVGRAAVTTTLAGSTAALTTLFGKRLQTGHWNVLDVCNGLLGGFAAVTAGCSVVDPWAAIICGFVSAWVLIGLNKLAARFKFDDPLEAAQLHGGCGAWGVIFTALFARREYVEQIYGAPGRPYGLFMGGGGRLLGAHVVLILVIAAWVSCTMGPLFLALNKLGLLRISAEDQMAGM

SEQ ID NO: 11091 - protein, 258 aa, Triticum aestivum
MSATCAADLAPLLGAAAMNATDYLCNRFADTTSAVDSTYLLFSAYLVFAMQLGFAMLCAGSVRAKNTMNIMLTNVLDAAAGALFYYLFGFAFAFGTPSNGFIGKHFFGLKDMPQTGFDYSFFLFQWAFAIAAAGITSGSIAERTQFVAYLIYSAFLTGFVYPVVSHWIWSVDGWASAARTSGPLLFKSGVIDFAGSGVVHMVGGIAGFWGALIEGPRIGRFDHAGRSVALKGHSASLVVLGTSCSGSAGTVQPGSFVT

SEQ ID NO: 11092 - protein, 346 aa, Corynebacterium efficiens YS-314
MGAMRIATLTSGGDCPGLNAVIRGIVRTASNEFGSTVVGYQDGWEGLLADRRVQLYDDEDIDRILLRGGTILGTGRLHPDKFRAGIDQVKANLADAGIDALIPIGGEGTLKGAKWLADNGIPVVGVPKTIDNDVNGTDFTFGFDSAVSVATDAIDRLHTTAESHNRVMIVEVMGRHVGWIALHAGMAGGAHYTVIPEVPFDISEICKRMERRFQMGEKYGIIVVAEGALPKEGTMELREGEVDQFGHKTFTGIGQQIADEVHRRLGHDVRTTVLGHIQRGGTPTAFDRVLATRYGVRAARACHEGQFNTVVALKGERIRMISFDEAVGTLKKVPMERWVTAQAMFG

SEQ ID NO: 11093 - protein, 191 aa, Nicotiana tabacum
MTFAGTTQKCSACEKTVYLVDRLAADNRIYHKACFRCYHCKSTLKLSNFNSFEGVIYCRPHFDQLFKRTGSLDKSFEGTPKVTKPEKPVDNENGSGSKVSSLFAGTREKCVGCTKTVYPIEKVSVNGTAYHKACFKCSHGGCTISPSNYIAHEGRLYCKHHHIQLFKEKGNYSQLESDHETDPALSTQSLT

SEQ ID NO: 11094 - protein, 406 aa, Ralstonia metallidurans CH34
MLSAASRPYIDASVPVLREHGLAITTHFYREMFAARPELKRIFNMGNQANGSQQQSLASAVFAYAANIDRADVLAPVVERIVHKHVAVGLTPAHYPIVGKYLLEAIAAVLGDAATPPLLAAWDEAYWLLAGELIAAEARLYERHGVAAGELLRVRVVNREQEGDQVVALTLAAEDGSPLRDFAPGQYISVEASFADGRRQLRQYSLSGERGLPTWRISVKREDGASDAPAGTVSNWLHENAQVGTTLHVSTPWGDFAPELDSRQPIVLMSAGIGVTPMVSVLRTLAHENPHRPVLFAHAARHGRQHAHRRDLAWARERMPNLRTHVSYETPQSVDASGRDYDHAGTMPVEALLKSGDNAAFNDARFYLCGPLGFMQEQRRALIASGVPVGHIHREVFGPDLLDDIL

SEQ ID NO: 11095 - protein, 504 aa, Sinorhizobium meliloti
MVMTVVVRPKALGDYDTREFRMLIDGQWVDGAEGRTIERVAPGHGVVVSRYQAAAKADAERAIAAARRAFDEGPWPRMTASERSLILLRAADMIAARADELAFLDAVESGKPISQAKGELAGAADIWRYAAALARELSGESYNTLGEGTLGVVLREPIGVVSIITPWNFPFLIVSQKLPFALAAGCTTVVKPSELTSASTLVLGEILEAAGVPQGVVNIIVGTGPEAGAPLTTHPHVDMVSFTGSTGIGQLTMANAAQTLKKVSLELGGKNPQIVFPDANLDEFIDAAVFGAYFNAGECCNAGSRLILHRDIAEEVTARIASLSAKVKVGDPLDPETQVGAIITPQHLQKIAGYVSSASNEGARIAHGGTTLDLGMGQFMAPTILSAVRPEMAVAREEVFGPVLSVLTFEKTEEAIRIANSIDYGLSAGVWSRDFDTCLTIGRRVRAGTVWMNTFMDGASELPFGGYRQSGLGRELGRHAVEDYTETKTLNMHIGRRSNWWMPR

SEQ ID NO: 11096 - protein, 286 aa, Burkholderia cepacia
MDASEFSKFLKAALPAQAIAGAALTVAEVEIPGYAQDIVLRLYRRPDKTGLPVVLYFHGGGFVRGSLEDADFAARFLAERLPALVVSVDYSLAPAFPFPAAPEDAYRAAVWAATRARAFGGNPKKIGVAGHDAGGQLANCLAFIARDRGEVSIAAQALFGPMLDPSMTRIGDAERLASDITARECAACYRAYLPQAAQRMHPYAAPIESVRLAGLPPTLVVTAQNDVLHVEAENYAGCLISSGVLTQVIRYPDITHAALATHEAAFEEAVRFFQCRFQARQPNRPE

SEQ ID NO: 11097 - protein, 367 aa, Arabidopsis thaliana
MGHLIPQTGDEETELGLAAVRLANCAAFPMVFKAAIELGVIDTLYLAARDDVTGSSSFLTPSEIAIRLPTKPSNPEAPALLDRILRLLASYSMVKCQIIDGNRVYKAEPICRYFLKDNVDEELGTLASQLIVTLDTVFLNTWGELKNVVLEGGVAFGRANGGLKLFDYISKDERLSKLFNRTGFSVAVLKKILQVYSGFEGVNVLVDVGGGVGDTLGFVTSKYPNIKGINFDLTCALTQAPSYPNVEHVAGDMFVDVPKGDAILLKRILHDWTDEDCEKILKNCWKALPENGKVIVMEVVTPDEADNRDVISNIAFDMDLLMLTQLSGGKERSRAEYVAMAANSGFPRCNFVCSAYHLWVIELTKQA

SEQ ID NO: 11098 - protein, 442 aa, Arabidopsis thaliana
MVDSDPVEFPPENRRGQLFGKYEVGKLVGCGAFAKVYHGRSTATGQSVAIKVVSKQRLQKGGLNGNIQREIAIMHRLRHPSIVRLFEVLATKSKIFFVMEFAKGGELFAKVSKGRFCEDLSRRYFQQLISAVGYCHSRGIFHRDLKPENLLLDEKLDLKISDFGLSALTDQIRPDGLLHTLCGTPAYVAPEVLAKKGYDGAKIDIWSCGIILFVLNAGYLPFNDHNLMVMYRKIYKGEFRIPKWTSPDLRRLLTRLLDTNPQTRITIEEIIHDPWFKQGYDDRMSKFHLEDSDMKLPADETDSEMGARRMNAFDIISGSPGFNLSGLFGDARKYDRVERFVSAWTAERVVERLEEIVSAENLTVAKKETWGMKIEGQKGNFAMVVEINQLTDELVMIEVRKRQRAAASGRDLWTDTLRPFFVELVHESDQTDPEPTQVHTTS

SEQ ID NO: 11099 - protein, 468 aa, Pasteurella multocida subsp. multocida str. Pm70
MKSRMLGDYNKLFRLCKYLREFTPVERAIHNRGETMNEQQLLECDRQHIWHPYAALNADFPLFVVERAEGVYIQLKNGQQLIDGMSSWWSAIHGYNHPRLNHAATQQLSQMSHVMFGGLTHQPAVELAQQLVNILPESLDKIFFADSGSVAVEVAMKMAVQYQHAKGETQRCKFATIRSGYHGDTWHAMSVCDPVTGMHSLFAKGLPVQYFLPQPPVKFGQAWQPEAMQPLQDLLAQHGDEIAGLILEPVVQGAGGMYFYSPEYLVQAKALCEQYGILLIFDEIATGFGRTGKLFACEHANVVPDVMCIGKALTGGYLTLSATITNQTVADVICSGEAKCFMHGPTFMANPLACAVAAESIKLLLASPWQQRIQQIEQQLRQELRQAEALDCVAEVRVLGAIGVIEMKAPVNMASLQPRFVQNGVWVRPFGKLVYLMPPYIISSDQLSQLIHGTIRTLQEEYAHKESL

SEQ ID NO: 11100 - protein, 413 aa, Magnetospirillum magnetotacticum MS-1
MPTPLSARTIAVVKATIPALETHGLTITRRMYERLFQNTDIRDLFNQSHHGETGSQPKALALAVLAYARNIDNLGVLTGAVERIAQKHVALNILPEHYSFVADALIGAIQDVLGEAATPEIVEAWGEAYWFLAELLIGREATIYRDLASKSGGWNGWRDFVVESVTPESEIIRSFVLVPADGGPVLRHEPGQYLGFLLDLPGRGVLKRNYSISCAPNDRAYRITVKREAKTEHPAGLVSNWLHDAAIAGTVLKVAAPAGDFFLDRSSNAPVVLVSGGVGLTPMVSMLESITETTPERPTWFVHSALNGRVHALREHVRNLAANRDNLRVRIFYTAPEAQDRVGEAYDIPGPVTAEWLVANTPSEQATYYLCGPKSFLASLANGLVRAGIPAERVRFEFFGPADALLEEPKQAA

SEQ ID NO: 11101 - protein, 196 aa, Triticum aestivum
  misc_feature (191)..(191): Xaa can be any naturally occurring amino acid
MHPTRWELSHMVDLQAAGLVISVVAAEVDSGGSSEMSDTDEHHFESKADSGASKTYPQQAGAIRKGGHIVIKARPCKVVEVSTSKTGKHGHAKCHFVAIDIFNGKKLEDIVPSSHNCDVPHVDRQDYQLIDITDDGYVGLLTESGNTKDDLKLPTDDVLLGQIKTGFADGKDLILSVMSAMGEEQICAVKXIGGGK

SEQ ID NO: 11102 - protein, 502 aa, Ralstonia solanacearum
MAQLLTVSEYAAMAGKLALPTQAFIDGAFVPAVSGKTFQTTNPATGNVLAEIAACDTRDVDIAVAKAKAAFEDGRWHRRSPAQRKATLLRLADLLEQHAHELAVMESLDSGKPIRECQATDVPETIHTIRWHAELIDKIYDSTAPVGSNALSLVVREPIGVVGLVLPWNFPLLMLAWKIGPSLAAGCSIIVKPAKETSLTALRVAELAHEAGVPAGVFNVLPGGGKEVGEPLGRHMDVSMVSFTGSTDTGRLFLKYAADSNLKRIVLECGGKNPAVVMNDVDDLDAVAQHVVNGAFWNMGENCSASSRLIVHADVKDALLARIGVHMREWKMGNPLDPEHRVGSLVSESHFRKVRSYLEHAGAEQLRVAFGGGTEGGIFVEPTVVDGVGQGSLLFREEIFGPILSVTTFTRMEDAIALANDSVYGLAASVYTDSLNNAIRLSREIRAGVVTVNCFGEGDVTTPFGGYKESGFGGRDKSIWAHDQYTEIKTIWIDVPDCTAAK

SEQ ID NO: 11103 - protein, 129 aa, Corynebacterium diphtheriae NCTC 13129
MPQGKVLWYDVDKGFGFVSNPEGDDCFVSKDVLPQGVQKLEKGQRVEFDYVARGRGPQALRIKVLDTPRLRRPAQHKYSAEELNSMISDLATLLEIKVQPSLRAGRYPDRKEGRQVANILRAVAKELDM

SEQ ID NO: 11104 - protein, 113 aa, Rickettsia sp. Hj126
ANEAVINMLKEIGSSEYIPKYIAKAKDKNDPFRLMGFGHRVYKNYDPRAAVLKETCKEVLKELGQLDNNPLLQIAIELEAIALKDEYFIERKLYPNVDFYSGIIYNAMGIPTQ

SEQ ID NO: 11105 - protein, 319 aa, Clostridium acetobutylicum ATCC 824
MKTIAVLTSGGDAPGMNAAIRAVVRTAIEKGINVKGIQRGYSGLINGEIFDMNRHSVSDIIQRGGTILRTARCPEFLKEEVRQKAANVLRVFGIDGLVVIGGNGSFMGAQKLSKLGVKTVGLPGTIDNDLPYTDYTIGFDTTLNTVLDAINKLRDTSTSHERVSIIEVMGRDCGDIALFSGIAGGAESVIIPEIGYDFNELCKNILEGKLRGKMHNLIILAEGVGGAAELAKKVEEVTGIETRSTILGHIQRGGSPSAFDRMLASRMGVKAVEVLMEGKTSRVIGIKEGKIMDQDIDEALAVPRSFNKELYDIANMLSK

SEQ ID NO: 11106 - protein, 370 aa, Sinorhizobium meliloti
MTVRNLFLLPGDGIGPEAMAEVRKIIAYMNAERDAGFVTDEGLVGGSAYDAHGAAISEGDMAKALAADAVLFGAVGGPKWDAVPYEVRPEAGLLRLRKDLELFANLRPAICYPALANASSLKPELVEGLDILIVRELTGGVYFGEPKEIVDLGNGQKRGIDTQVYDTYEIERIAGVAFELARTRNNRVCSMEKRNVMKSGVLWNQVVTETHKAKYSDVQLEHMLADAGGMQLVRQPKQFDVIVTDNLFGDMLSDVAAMLTGSLGMLPSASLGAPDAKTGKRKALYEPVHGSAPDIAGTGVANPIAMIASFAMCLRYSFNLVKEADDLEKAIANVLDQGIRTGDIMAEGCRKVGTAEMGDAILAEFKSLSA

SEQ ID NO: 11107 - protein, 140 aa, Triticum aestivum
  misc_feature (117)..(117): Xaa can be any naturally occurring amino acid
  misc_feature (129)..(129): Xaa can be any naturally occurring amino acid
MAPTVMASSATSVAPFQGLKSTAGLPISRRSSSAGLSSVSNGGRIRCMQVWPIEGIKKFETLSYLPPLSTEALLKQVDYLIRSKWVPCLEFSKVGIVFREHNSSPGYYDGRYWTMWXLPMFGCTDATQXLNEVEEARRST

SEQ ID NO: 11108 - protein, 255 aa, Populus deltoides
MGRGRVQLKRIENNISRQVTFSKRRTGLLKKAHEISVLCDADVAVIVFSTKGKLFEYSTDSSMESILERYERCSYAEQQFVPHGPEHQGSWFLEHPKLRARVELLQRNLRNYTGQDLDPLSYKELHHLEQKIDTALKSVRSRKNQLVHESLAEMQKKEKALQDQNNILVEQVKKKLKALTEQAQWEQQNLGQNSSSFMLPQAQPPLQPSMLSHPPPTLGGSFQIRGFLNGNKDVEVQTQPSTMPHWMLRHVNDRI

SEQ ID NO: 11109 - protein, 424 aa, Clostridium acetobutylicum ATCC 824
MIIIKNGYVIDPLTKREGKFDILIDGENVVRISQDIGIDDDIEVIDAEDCIVSPGFIDIHSHFRDPGFTEKEDIITGARAAARGGYTTVICMANTNPVVDNVETLRYIVDKAKTAKIEVLQVGTITKGMQGVELVDMEALKEAGAVGFSDDGKPIMDSRLVLEAMQKARELDVPLSFHEEDPKLVYESGINGGKVAEKLNMMGALEEAETVLTARDAALAVSSGAKTNIQHISSKISLGIIKLAKEMGANIIAEATPQHFSITEEEILNCGTNAKVNPPLRREDDRKAIVAALKDDTIQVIATDHAPHTKDEKAREFKEAPSGMIGLETALSLAVTNLVKTGDLTYRDMISKLTINPARFYNLDRGYIKEGHRADIVIFDPDEKYTVKEEEFQSKASNSPFIGKELFGKVKTTIYNGKIVYEDK

SEQ ID NO: 11110 - protein, 168 aa, Zea mays
  misc_feature (42)..(42): Xaa can be any naturally occurring amino acid
  misc_feature (72)..(72): Xaa can be any naturally occurring amino acid
  misc_feature (126)..(126): Xaa can be any naturally occurring amino acid
  misc_feature (144)..(144): Xaa can be any naturally occurring amino acid
MGMSLVNITNVAVLDNSSTFINPGQFGVSSECLVSIDGHLKXKLLYVGSVEDDISGHQLESGLVGPDNVGPXRCVLQTDPPDPSKLCEEYIFGASELLLHCTYMGQEFMTVECYLGHYYADVLLRXSLQRKVVIFGVQRTLVAXTKPQITKFHISIHLEAEYVGRDPA

SEQ ID NO: 11111 - protein, 360 aa, Triticum aestivum
MGSTAADMAASADEEACMYALQLVSSSILPMTLKNAIELGLLETLVAAGGKLLTPAEVAAKLPSTANPAAADMVDRMLRLLASYNVVSCTMEEGKDGRLSRRYGAAPVCKFLTPNEDGVSMAALALMNQDKVLMESWYYLKDAVLDGGIPFNKAYGMSAFEYHGTDPRFNRVFNEGMKNHSIIITKKLLEVYKGFEGLGTIVDVGGGVGATVGAIVAAYPAIKGINFDLPHVISEAPPFPGVTHVGGDMFQKVPSGDAILMKWILHDWSDEHCATLLKNCYDALPAHGKVVLVECILPVNPEATPKAQGVFHVDMIMLAHNPGGRERYEREFEALAKGAGFKAIKTTYIYANAFAIEFTK

SEQ ID NO: 11112 - protein, 454 aa, Arabidopsis thaliana
MNEDRISDLPDALLLQILSSLPTENAIATSVLSKRWRSLWTMLPKLKFDSNFNPVFDDDNIDPTMFSENVYKTLSLHKAPVLESLHLSFEGRTDCLHVGIWIATAFARGVRKLVLDSFYQEDQTVTLPSVLFSYNDSLEILKLKCAIDLDFPSRVCLKSLRKLYLDQVHFKDEESVCNLLCGCPSLQDLVVHRYSNADVATFTIASPSLQRLTIEDLRQEGGYGNGSYVINAPGLKYLNINGVIDIESCLIDKALELEEAKISNVSGITNENILESLTSAKRLILHLSPLEVKVPTGKIFDQLGCLELLTHEREWWNLLSIMLDSSPKLQILKLTDVSNFTSCLFPQLHFQVYLHDNKTNPDERKWNPPKCAPECLLFHLETFLWIGYEWQRGDEKEVATYILENARRLKKATFSTKRIGREKLEDFEKRREMLNELAIVLWDSNSCHLVFEST

SEQ ID NO: 11113 - protein, 176 aa, Glycine max
ELEDMKKRLKEIEEEASALREMQAKVEKEMGAVQDSSGTSATQAEKEEVDARSIYVGNVDYACTPEEVQQHFQSCGTVNRVTILTDKFGQPKGFAYVEFVEIDAVQNALLLNESELHGRQLKVSAKRTNVPGMKQYFGRRPAGFRSRRPFMSAPFFPPYGYGRVPRYRRPTRYRPY

SEQ ID NO: 11114 - protein, 157 aa, Triticum aestivum
GTRQPFPQQPQQPFPQPQLPFPQQSEQIIPQQPQQPFPLQPQQPFPQQPQQPFPQPQQPIPVQPQQSFPQQSQQSQQPFAQPQQLFPELQQPIPQQPQQPFPLQPQQPFPQQPQQPFPQQPQQSFPQQPQQPFPQQPQQPYPQQQPYGTSLTSIGGQ

SEQ ID NO: 11115 - protein, 177 aa, Dunaliella salina
SVAYKNVIGARRASWRIISSIEQKEESKGNEEHVQRIRSYRKMVEKELSDICSSILQLLDEHLIPTASTGESKVFYLKMKGDYHRYLAEFKTGSDRKEAAEHTLLAYKAAQDIALVDLPPTHPIRLGLALNFSVFYYEILNSPERACHLAKQAFDEAIAELDTLGEESYKDSTLIMQ

SEQ ID NO: 11116 - protein, 497 aa, Pseudomonas saccharophila
MKNQVQLITYVDRLGGQRDGADLARLKKLLCEPGQPLADVFGGVHLLPFFHAIDGADAGFDPIDHTLVDPRLGDWSDIKALTEGLEVMGDVIVNHMSSESPQFQDFSAKGRESAYDGLFLTLDAVFPNGATERDLLTVYRPRPGPAAELCDAEERRARILWTTFTAAQIDIAVHHPQGRAYLESILQTFAANGIRMVRLDAVGYAIKKAGASCFMMPETFGFIAEFAQAARALGIEVLVEIHAYYQRQIEIASQVDWVYDFALPPLVLHAFEFKTAGALKRWIAVRPTNALTVLDTHDGIGIIDIGADASDRAAHPGLVPPEELDALVERIHAASQGQSRKPTGAAASNLDLYQVNCSFFDAMGRNETAYLLARAIQFFLPGVPQVYYVGLLAGHNDMELLARTQVGRDINRHYYDAAEIASDCERPVVRRLIELIRLRNRHPAFGGVFSVEAGGDDELHLRWQQGGDWGPLRVNFASLDHELSCSRRRRDRAFAFS

SEQ ID NO: 11117 - protein, 149 aa, Glycine max
MEPMDIVGKAKEDASLPKATMTKIIKEMLPPDVRVARDAQDLLIECCVEFINLVSSESNEVCNKEERRTIAPEHVLKALGVLGFGEYIEEVYAAYEQHKLETMQDSLKGAKWSNRAEMTEEEALAEQQRMFAEARARMNGGAITSKQPD

SEQ ID NO: 11118 - protein, 214 aa, Zea mays
MAAVEVCVKAATGKPDTLGDCPFSQRVLLTLEEKKVPYEVKLVDLDNKPEWFLKISPEGKVPVFNGGDGKCIADSDVITQTIEEKFPTPSLVTPVEYASVGSKIFPAFITFLKSKDASDGSEKALLDELQALDEHLKAHGPYINGENVSAADLSMGPKLFHLQVALEHFKGWKIPENLTNVHAYTKAFFSRESFVKTKPSEEHVIAGWAPKVNA

SEQ ID NO: 11119 - protein, 181 aa, Arabidopsis thaliana
MSQLGVETSQAQPETPQSTTFLDLLRLQMDGLDRSRRRKRTLKERLGFKRIGCCGPTWGLRLTSNTGEDDDEPFENRLVSGSDHVTGPLNQGMNLATALAAERNYRTEETEASGSLTPLKVSLMRLLEETAERVVVEENETERVTASASSTVRGVNNDSVWLNRGSCPLCNRPIIEILDIY

SEQ ID NO: 11120 - protein, 506 aa, Oleomonas sagaranensis
MIHQTIEEISKSIAFRSRYDNFIGGKWVAPVRGQYFDNITPITGMPVAQIARSTAEDIELALDAAHAAKDAWGRTSVAERARLLNKIADRMEEKLDLLAMVETIDNGKPIRETKAADLPLAIDHFRYFASCVRAQEGSIGEVDHDTMAYHFHEPLGVVGHIIPWNFPLLMACWKLAPALAAGNCVVLKPAEQTPLSIMVWADLIGDILPPGVLNIVNGFGIEAGKPLASNKRIAKIAFTGETTTGRLIMQYASENLIPVTLELGGKSPNIFHEDVAAEDDDYFDKAIEGFVLFALNQGEVCTCPSRAIIHEKIYDKFMERALARVAAIKQGSPLEAATMLGAQASNDQLEKILSYIDIGKAEGAELLIGGERNILGGELAGGYYVKPTVFRGNNKMRIFQEEIFGPVVSVTTFKDEAEALSIANDTLYGLGAGVWTRDGNRAYRFGRAIQAGRVWTNCYHLYPAHAAFGGYKQSGIGRETHKMMLDHYQQTKNLLVSYSPKALGFF

SEQ ID NO: 11121 - protein, 447 aa, Chlorobium tepidum TLS
MSDSDHRNSLTIIDNRTGKSYELPIENGTIRTMDLRKIKESEDDFGLLGYDPAFLNTCSCKSTITFIDGDKGILRYRGYPIEQLAEKSSFLETAYLLIKGELPDKERLAVWTYNIRHHTMTHANLTKFMDGFRYDAHPMGILVGTLGALSTFYPDAKNVGEEESRKLQVRRLIGKMPTLAAMSFRHSLGFPYVLPDNDLSYAGNFLSMMFRMTEKNYKPNPVLEHALDVLFILHADHEQNCSTNAVRSVSSSMVDPYSAIAAGCAALYGPLHGGANEAVIHMLKQIGSVDKIPEFIKLVKSGEGRLMGFGHRVYKNYDPRARIIKKIAFDVFEETGRNPLLDIAIELERIALEDDYFIQRKLYPNVDFYSGLIYQAMGFPTEMFPVLFAIGRTPGWLAQWIEHVKDPEQKIARPRQIYLGEKCRDYVPIDERPRKGDDEQKFGICRL

SEQ ID NO: 11122 - protein, 316 aa, Escherichia coli
TDKLTSLRQYTTVVADTGDIAAMKLYQPQDATTAPSLILNAAQIPEYRKLIDDAVAWAKQQSNDRAQQIVDATDKLAVNIGLEILKLVPGRISTEVDARLSYDTEASIAKAKRLIKLYNDAGISNDRILIKLASTWQGIRAAEQLEKEGINCNLTLLFSFAQARACAEAGVFLISPFVGRILDWYKANTDKKEYAPAEDPGVVSVSEIYQYYKEHGYETVVMGASFRNIGEILELAGCDRLTIAPALLKELAESEGAIERKLSYTGEVKARPARITESEFLWQHNQDPMAVDKLAEGIRKFAIDQEKLEKMIGDLL

SEQ ID NO: 11123 - protein, 464 aa, Burkholderia cepacia R1808
MKQSIDALLRADRAHFMHPSTHAYDHESGALPGRIVRGAHGIHIEDHEGRRYIDAFAGLYCVNIGYGRTEVADAMHEQAKQLAYYHTYVGHASDAIIELSSRIIECAPVGMKKVYYGMSGSDANETQVKLVWYYNNVLGRPNKKKIISRERGYHGSGIVTGSLTGLPSFHQHFDLPIDRVKHTVCPHWYRNAPVGMSEAQFVAYCVDELEKLIAREGADTIAAFIAEPVMGTGGIIAPPAGYWPAIQAVLRQHDILLISDEVVCGFGRLGSKMGAQHFGIEPDLITVAKGLTSAYAPLSGVIVGDKVWDVIARGSQAHGPMGHGWTYSGHPVCAAAALANLAILERENLVGNAAEVGAYFGAKLRDAFGAHPLVGEVRSVGMLAALEFMADRDARTPFDPALKIGAQVSAAALRRGVIARAMPHGDILGFAPPLVMTRAEADEIVGIVKEAVDEVAERNLAAVS

SEQ ID NO: 11124 - protein, 316 aa, Escherichia coli
TDKLTSLRQYTTVVADTGDIAAMKLYQPQDATTNPSLILNAAQIPEYRKLIDDAVAWAKQQSNDRAQQIVDATDKLAVNIGLEILKLVPGRISTAVDARLSYDTEASIAKAKRLIKLYNDAGISNDRILIKLASTWQGIRAAEQLEKEGINCNLTLLFSFAQARACAEAGVFLISPFVGRILDWYKANTDKKEYAPAEDPGVVSVSEIYQYYKEHGYETVVMGASFRNIGEILELAGCDRLTIAPALLKELAESEGAIERKLSYTGEVKARPARITESEFLWQHNQDPMAVDKLAEGIRKFAIDQEKLEKMIGDLL

SEQ ID NO: 11125 - protein, 435 aa, Corynebacterium diphtheriae NCTC 13129
MKGMLVATENKDKAVLHYPGGEYEMDIIHATEGNDGVVLDKLLSQTGMVTFDPGYVSTGSTESKITYIDGDNGILRHRGYDIADLAENATFNEVSYLLIKGHLPTVDELHKFNNEIRHHTLLDEDFKSQFNIFPRDAHPMSVLASSVNILSTYYQDQLNPLDEEQLDKATVRLLAKVPMLAAYAYRASKGAPYMYPDNSLNARENFLRMMFGYPTEPYEVDPVVAKALDKLLILHADHEQNCSTSTVRMIGSAQANMFVAVAGGINALSGPLHGGANQAVLEMLEEIKANGGDATDFMNRVKNKEKGVRLMGFGHRVYKNYDPRAAIVKETAHEILEHLGGDELLDLAMKLEEIALSDDYFVSRKLYPNVDFYTGLIYRAMGFPTDFFTVLFAIGRLPGWIAQYREQLATTTKINRPRQIYTGETLRKVTPREQR

SEQ ID NO: 11126 - protein, 492 aa, Burkholderia cepacia R1808
MLPGHPVLFKSMCYVDGRWIHSDSAATRAVVNPADQSVIGHVPMLERAQIVGAVDAAQRAFGTWRWTPQAARSAALLRWHALILRHLDDLAALLSLEQGKPLAEARGEIRYAASFVEWFANEAKRAVGRTIPTHIDGAHLGTVMEPVGVAALITPWNFPAAMITRKAAAALAVGCTVIVKPAHETPFSALALAQLADEAGFPAGVFNVVLGEPQMAMEALVGDARVRAVSFTGSTRVGRLVTETAAKAGIRKIALELGGNAPFIVTDDADLDDAVRIAVGAKFQTSGQDCCAANRIFVARALYDAFVGRYASAVRALKTGPAFEPGVDVGPLMHQAAFDATVARVDDARARGARIVAGGRPHALGGWFYEPTVIADAAPGMRVYDEENFAPISAVCAFDTLDEVVARANDTEYGLAAYVCATRIDTIFRLVRRLDFAMVSVNGVKFTGAPIPFGGMKASGLGREGGVEGFEPFTETKYFCFGNLGLPVAATA

SEQ ID NO: 11127 - protein, 221 aa, Zea mays
  misc_feature (204)..(204): Xaa can be any naturally occurring amino acid
MARRAASSLVSRCLLARAPAGAPPAAPSAPRRTDGMHRLLPGVLQRFSTAAAVEEPITPSVHVNYTKLLINGNFVDSASGKTFPTLDPRTGEVIAHVAEGDAEDINRAVAAARKAFDEGPWPKMTAYERSRILLRFADLIEKHNDELAALETWDNGKPYEQAAQIEVPMVARLMRYYAGWADKIHGLIVPADGPHHVQILHEPXGVAGQIIPWNFPLLMYG

SEQ ID NO: 11128 - protein, 579 aa, Glycine max
MCGILAVLGCSDSSQAKRVRVLELSRRLKHRGPDWSGLHQYGDNYLAHQRLAIVDPASGDQPLFNEDKTVVVTVNGEIYNHEELRKQLPNHTFRTGSDCDVIAHLYEEHGENFMDMLDGIFSFVLLDTRDNSFIVARDAIGVTSLYIGWGLDGSVWISSELKGLNDDCEHFESFPPGHLYSSKERAFRRWYNPPWFSEAIPSAPYDPLALRHAFEKAVVKRLMTDVPFGVLLSGGLDSSLVAAVTARYLAGTKAAKQWGTKLHSFCVGLEGAPDLKAAKEVAEYIGTVHHEFHYTVQDGIDAIEDVIYHIETYDVTTIRASIPMFLMSRKIKSLGVKMVISGEGSDEIFGGYLYFHKAPNKEEFHQETCRKIKALHKYDCLRANKSTFAWGLEARVPFLDKEFIRVAMNIDPECKMIKKEEGRIEKWALRRAFDDEEHPYLPKHILYRQKEQFSDGVGYGWIDGLKAHAEKHVTDRMMLNAANIFPFNTPTTKEAYHYRMIFERFFPQNSARLTVPGGPSVACSTAKAVEWDAAWSNNLDPSGRAALGVHASAYGNQVKAVEPEKIIPKMEVSPLGVAI

SEQ ID NO: 11129 - protein, 316 aa, Escherichia coli
TDKLTSLRQYTTVVAATGDIAAMKLYQPQDATTNPSLILNAAQIPEYRKLIDDAVAWAKQQSNDRAQQIVDATDKLAVNIGLEILKLVPGRISTEVDARLSYDTEASIAKAKRLIKLYNDAGISNDRILIKLASTWQGIRAAEQLEKEGINCNLTLLFSFAQARACAEAGVFLISPFVGRILDWYKANTDKKEYAPAEDPGVVSVSEIYQYYKEHGYETVVMGASFRNIGEILELAGCDRLTIAPALLKELAESEGAIERKLSYTGEVKARPARITESEFLWQHNQDPMAVDKLAEGIRKFAIDQEKLEKMIGDLL

SEQ ID NO: 11130 - protein, 214 aa, Helianthus annuus
MKSFTGTTQKCTVCEKTVYLVDKLVANQRVYHKACFRCHHCNSTLKLSNFNSFDGVVYCRHHFDQLFKRTGSLEKSFDGTPKFKPERTFSQETQSANRLSSFFEGTRDKCNACAKIVYPIERVKVDGTAYHRACFKCCHGGCTISPSNYIAHEGRLYCKHHHIQLFKKKGNYSQLEVEETVAAPAESETQNAETQNAETQNADTQNTDTQNAAV

SEQ ID NO: 11131 - protein, 108 aa, Brassica rapa subsp. pekinensis
FVTFLKSIDSSDGSEKALLDELEALETHLKTHDGPFIAGGKVSAVDLSLAPKLYHLKVALGHYKSWSVPESLPHVHGYMKALFSLDSFEKTKTEERYVIAGWEHKVNP

SEQ ID NO: 11132 - protein, 316 aa, Escherichia coli
TDKLTSLRQYTTVVADTGDIAAMKLYQPQDATTNPSLILNAAQIPEYRKLIDDAVAWAKQQSNDRAQQIVDATDKLAVNIGLEILKLVPGRISTEVDARLSYDTEASIAKAKRLIKLYNDAGISNDRILIKLASTWQGIRAAEQLEKEGINCNLALLFSFAQARACAEAGVFLISPFVGRILDWYKANTDKKEYAPAEDPGVVSVSEIYQYYKEHGYETVVMGASFRNIGEILELAGCDRLTIAPALLKELAESEGAIERKLSYTGEVKARPARITESEFLWQHNQDPMAVDKLAEGIRKFAIDQEKLEKMIGDLL

SEQ ID NO: 11133 - protein, 290 aa, Corynebacterium diphtheriae NCTC 13129
MVTMKQHENIIPTITLNDGTEMPAIGFGTYKLREQDAYRAVRSAIEVGYRHIDTASLYKNEEEVGRAVADAITAGEVARDELFITTKVWNDMHGDQLTQRSFQESLHRLGLDYIDCCMVHWPWPQKGLYVESFAALAKIQGLGQLQSVAVANFYPEVLREIVAETGIAPVLNQVELHPGFSQAEQRAVDRELGVVTEAWSPLGRGDSLNAEAITLIAQCYEKTPAQVTLRWIHQLGCSVVPKSANPQRQRENLDIFDFELNTEDMNSITSLDEQGGRLFVDPHDFPGEVE

SEQ ID NO: 11134 - protein, 283 aa, Rhodospirillum rubrum
MTEWFSETLHPHWRQSFAADRVLLREQTAHQDLVILENQTFGRVMVLDGMVQLTERDEFVYHEMIAHVPLFGHGAARRVLIIGGGDGGTLREVLRHKTVERATMVEIDATVVEMARDHMPMVSDGAFDDPRAELIIADGIAFVAGAHQPYDVIIIDSTDPFGPAEGLFTPAFYGACRQLLTPGGVLVVQAGVPFLQPREIAHVNAALSAAFPEVAFYAIAVPTYVGGLMTLGWASEDAGKKVPDPAVLAARVAASGLAFGYYSPEGHAGAFALPPHIRAAARG

SEQ ID NO: 11135 - protein, 396 aa, Burkholderia cepacia R1808
MTLGFSEHRLAKVAAEQYSAFPGYHTFFGRNSKPTVELSERMLALAPVPMSRVFFTNSGSEANESVIKLLWMMWAAEGQPQRRKLLTRKNAYHGATVMASALTGKDYVKAFGLPTPDVITLDCPHAWRFAQAGESEEAFVKRLVSNLEKTILAEGPDTIAGMFAEPVMGAGGVIVPPAGYFEQVQAVLKKYQIPLVADEVICGFGRTGNLWGCQTVGLRPDIIVASKSMSAGYFPVGAVMLSAEIDRRATAASEQWEEFPHGFTTAGHPVACAVSLEAIRIITDEGILENVQKVGRKFQDGLRALADHPMVGDVRGVGLMGALEMVSDKSSKTSFSGELRVGERIAKAAREFGYIIRPLGASVVLAPPFITTSEQIDDLLTVLKRVLDSVYKDISG

SEQ ID NO: 11136 - protein, 175 aa, Oryza sativa
MAPSVMASSATTVAPFQGLKSTAGMPVARRSGNSSFGNVSNGGRIRCMQVWPIEGIKKFETLSYLPPLTVEDLLKQIEYLLRSKWVPCLEFSKVGFVYRENHRSPGYYDGRYWTMWKLPMFGCTDATQVLKELEEAKKAYPDAFVRIIGFDNVRQVQLISFIAYKPPGCEESGGN

SEQ ID NO: 11137 - protein, 188 aa, Helianthus annuus
MAFAGTTQKCMACDKTVYLVDKLTADNRVFHKACFRCHHCNGTLKLSNYNSFEGVLYCRPHFDQLFKKTGSLDKSFEGTPNIVKQPKTIDGEKPMANKVSSMFVGTKDKCLGCKNTVYPTEKVSVNGTAYHKSCFKCSHGGCTISPSNYIAHEGHLYCRHHHTQLIKEKGNLSQLEGERSARVGETAP

SEQ ID NO: 11138 - protein, 172 aa, Arabidopsis thaliana; identical to SEQ ID NO: 382

SEQ ID NO: 11139 - protein, 410 aa, Zea mays
  misc_feature (290)..(290): Xaa can be any naturally occurring amino acid
MASVSVVLLQRSSSRVRGYIRLQRIASSSVTLVLEGEGHWWWSNSRGRDERFGARTVHHMAGSGEGENGGVPAGGQVAMAPGVVTGGVEDAYGEDRATEDQTVTPWAVCIASGHSLLRDPRHNKGLSFTEKERDTHYLRGLLPPVVLSQDLQEKRMLQNVRQFQVPLQRYTALMDLQERNERLFYKLLIDNVEELLPVVYTPTVGEACQKYGSIFRRPQGLYISLKEKGRILEVLRNWTEKSIQVIVVTDGERILGLGDLGCQGMGIPVGKLALYTALGGVRPSAVSFNXCLPITIDVGTNNEDLLKDEFYIGLKQRRATGQEYSEFLDEFMAAVRQNYGQKVLVQFEDFANHNAFILLEKYRTNHLVFNDDIQGTAAVVLAGIIAALKSVGGTLADHTFLFFSASYTIK

SEQ ID NO: 11140 - protein, 181 aa, Oryza sativa (japonica cultivar-group)
MTEEQAVAEQQRMFAEARARMNNGAAKPKEPEPEAQQQTQQPPQPQLHPQPQQPLQPQLQLHPQPQQQPSQLHPQQLLHPQSQQTPQPQPQVHPQPQQPPQLQPQPQLLQQPQLPQQLQPQSQLPPQPQQPPQLQLQSQLHPQPQQPPQLQPQPQLHQQPQPQAELQSQSQPQTEHGLDSS

SEQ ID NO: 11141 - protein, 387 aa, Ceriporiopsis subvermispora
MAFTSLLALVALAAITRAAPTTICPDGTRVSNHVCCDFIPLAQALQSTLYMGDCGEDAHETIRLTFHDAIAISQSQGPSAGGGADGSMLIFPTVEPFFHANAGIDDSVNNLIPFLDKFPTITAGDLIQFAGTVALSNCPGAPQLEFLAGRPNATAPAVDGLIPEPQDNVTHILERFADAGGFTPFEVVSLLASHTVARADKVDLTIDAAPFDSTPFTFDTQIFLEVLLKGVGFPGTDNNTGEVESPLPLGNNKQGGNDTGEMRLQSDFALARDDRTACFWQGFVNEQEYMMSSFKAAMSKLAILGHNRNDLIDCSEVVPTPKPPVGKPASFPATTGPQDLQLTCKSERFPSLTIDHGAQETLIPHCSNGGQDCPTVQFTGPAGEDDS

SEQ ID NO: 11142 - protein, 392 aa, uncultured bacterium pCosFS1
MSVTDSDLEFDQRHIWHPYTSMSHPLPCYPVEAASGVELQLADGRRLIDGMSSWWAAIHGYNHPQLNLAATQQLEKMSHVMFGGITHPAANELCRKVVAMTPEALQCVFLADSGSVAVEVSLKMALQYWQARGERRQRILTLRHGYHGDTFGAMSVCDPDNSMHSLYQGYLAPHLFATAPQCGFDQAWDENDIAPFAALLEQHAGEVAAVILEPVVQGAGGMRIYHPTYLERVRELCDRYQVLLIADEIATGFGRTGKLFACEHAEVVPDILCLGKALTGGYMTLSATLTTRHVAETISNGAAGCFMHGPTFMGNPLACAVANASLSLLAENRWQQQVAAIETQLKQQLLPLKMQPKVADVRVLGAIGVVEMREPVDMAQLQRGFVERGVWI

SEQ ID NO: 11143 - protein, 430 aa, Glycine max
  misc_feature (44)..(44): Xaa can be any naturally occurring amino acid
MDPENQLTSNPRSIILNKYEMGRVLGQGNFAKVYHGRNLNTNEXVAIKVIKKEKLKKERLVKQIKREVSVMKLVRHPHIVELKEVMATKGKIFLVMEYVNGGELFAKVNNGKLTEDLARKYFQQLISAVDFCHSRGVTHRDLKPENLLLDQNEDLKVSDFGLSALPEQRRADGMLLTPCGTPAYVAPEVLKKKGYDGSKADIWSCGVILFALLCGYLPFQGENVMRIYRKAFRAEYEFPEWISTQAKNLISKLLVADPGKRYSIPDIMKDPWFQVGFMRPIAFSIKESNVVEDNEGKPARPFYNAFEIISSLSHGFDLRSLFETRKRSPSMFISKFSASTVLAKVEAVAKKLNFRVTGKKEFVVRMQGAEEGRKGKLAMTVEVFEVAPEVAVVEFSKSAGDTLEYVRFCDEQVRPSLKDIVWSWQGDTNS

SEQ ID NO: 11144 - protein, 261 aa, Guillardia theta
MNVKYINVWKYNVKDIFKEINNLCKDTCLISLDTEFPGIVLKIKSFKYSSENASYHMLRKNVNILKTIQIGLTFDKNCNFKFSTTFQFNFVYDFENNCFAQDSIDLLSKSKLLFETNNKIGINLDLFKEFLTSSSLLCNKKLKWITFHSGYDFGYLINLITNKELPLSKKDFIEHLNFYFPCFFDLKHLGYFSSNFYGSLDKIAEKFNINRIGKSHQAGSDSLITLNIYKIISNDIKPREYFRKFKCVLYNSPSVVHNYYL

SEQ ID NO: 11145 - protein, 509 aa, Agrobacterium tumefaciens str. C58
MDAMTKLDVKQEAAALLDKMGVARDLYTGGDMASFSPVTGEQIASLRTVSVEGVAAVVDKADAAFRTWRNVPAPRRGELIRLLGEELRAFKTDLGRLVSLEAGKIPSEGLGEVQEMIDICDFAVGLSRQLYGLTIATERPGHRMMETWHPLGVVGVISAFNFPVAVWSWNAALALVCGNSVVWKPSEKTPLTALAVQGIFERAAARFGDAPEGLSQLLIGDRAVGEAMVDYPKVPLVSATGSTRMGRDVGPRLAKRFARAILELGGNNAGIVCPSADLDMALRAIAFGAMGTAGQRCTTLRRLFVHDSVYEELVPRLKKAYASVSVGNPLESSALVGPLVDKAAFDGMQKAIEAAKAAGGVVHGGDRVDTGAADAYYVKPALVEMPKQVGPVLEETFAPILYVMKYSDLDQAIDAHNAVAAGLSSSIFTRDIQESERFLSSEGSDCGIANVNIGTSGAEIGGAFGGEKETGGGRESGSDSWKAYMRRATNTINYSKALPLAQGVSFDIE

SEQ ID NO: 11146 - protein, 634 aa, Zea mays
ISPKVSHFGVNPKARWRVRSYKVLLQCNASLPLVGADVSEVDDPLRVAPLVVVPGDDLDHVVAHDHGEGGVDGGGDVGAPEVDGHERHVADLEDARELVGRGVAERLVHLLGEGLLGDLHDEVDDGDVRGGHPERDPVELALKVGEHQRDGLGGTGGRQETDERLFYKLLIDNVVELLPFVYTPTVGEACQKYGSIFGRPQGLYVSLKDKGKVLEVLRNWPHRNIQVICVTDGERILGLGDLGCQGMGIPVGKLALYTALGGVDPSVCLPITIDVGTNNEKLLNDEFYIGLRQKRATGEEYDELIEEFMSAVKQFYGEKVLIQFEDFANHNAFDLLEKYSKSHLVFNDDIQGTASVVLAGLLAALKMVGGTLAEQTYLFLGAGEAGTGIAELIALEISKQTNAPIEECRKKVWLVDSKGLIVDSRKGSLQPFKKPWAHEHEPLKTLYDAVQSIKPTVLIGTSGVGRTFTKEIIEAMSSFNERPIIFSLSNPTSHSECTAEQAYTWSQGRSIFASGSPFAPVEYEGKTFVPGQSNNAYIFPGLGLGLVISGAVRVHEDMLLAASKALADQATQDNFEKGSIFPPFTSIRKISAHIAAAVAAKAYELGLATRLPPPSDLVKYAENCMYTPVYRNYR

SEQ ID NO: 11147 - protein, 333 aa, Deinococcus radiodurans
  misc_feature (309)..(309): Xaa can be any naturally occurring amino acid
MAKYRICLIEGDGIGHEVIPAAKRVLEAAGFDAEYVHAEAGYEYFLDHGTSVPEATYDAVENTDATLFGAATSPSGEKPAGFFGAIRHLRQKYNLYANVRPTKTRPVPHSYENVDLVIVRENTQGLYVEQERRYGDTAIADTVITREASDRIGKFAADLAMKRSKRLTVVHKSNVLPVTQGLFMNTILDHTKTVEGLSTSTMIVDNAAMQLVRNPQQFDVMVMTNMFGDILSDLAAGLVGGLGIAASGNVGDQFGIFESVHGSAPDIAGQGISNPTATILAAVIMLDHLGDHETARRLDNAINKVLAEXPRTRDLGGTAGTQEFTEAVIKALA

SEQ ID NO: 11148 - protein, 175 aa, Triticum aestivum
MAPTVMASSATSVAPFQGLKSTAGLPVSRRSNGASLGSVSNGGRIRCMQVWPIEGIKKFETLSYLPPLSTEALLKQVDYLIRSKWVPCLEFSKVGFIFREHNASPGYYDGRYWTMWKLPMFGCPDATQVINEVEEVKKEYPDAYVRIIGFDNMRQVQWVSFIAFKPPGCEESGKA

SEQ ID NO: 11149 - protein, 402 aa, Zea mays
TGRDEAAWDMDDVAGCFEYFTDQAEALDKRQNSPVSLPMETFKCHLRREPIGVVGLITPWNYPLLMATWKVAPALAAGCAAVLKPSELASVTCLELADICKEVGLPPGVLNIVTGLGPDAGAPLSAHPDVDKVAFTGSFETGKKIMAAAAPMVKPVTLELGGKSPIVVFDDVDIDKAVEWTLFGCFWTNGQICSATSRLLVHTKIAKEFNEKMVAWAKNIKVSDPLEEGCRLGPVVSEGQYEKIKKFILNAKSEGATILTGGVRPAHLEKGFFIEPTIITDITTSMEIWREEVFGPVLCVKEFSPEDEAIELANDTQYGLAGAVISGDRERCQRLSEEIDAGIIWVNCSQPCFCQAPWGGNKRSGFGRELGEGGIDNYLSVKQVTEYISDEPWGWYRSPSKL

SEQ ID NO: 11150 - protein, 427 aa, Zea mays
  misc_feature (265)..(265): Xaa can be any naturally occurring amino acid
  misc_feature (270)..(270): Xaa can be any naturally occurring amino acid
RCRCCAQQERGRIMSKLADLVEQHTEELAALDGADAGKLLLLGKIIDIPAATQMLRYYAGAADKIHGDVLRVSGRYQGYTLKEPIGVVGVIIPWNFPTMMFFLKVSPALAAGCTVVVKPAEQTPLSALYYAHLAKMAGVPDGVINVVPGFGPTAGAALASHMDVDSVAFTGSTEVGRLIMESAARSNLKMVSLELGGKSPLIIFDDADVDMAVNLSRLAVFFNKGEVCVAGSRVYVQEGIYDEFVKKAVEAARSWKVGDPERIIXSVGRXVDKDQFERVLKYIEHGKSEGATLLTGGKPAADKGYYIEPTIFVDVTEDMKIAQEEIFGPVMSLMKFKTVDEVIEKANCTRYGLAAGIVTKSLDVANRVSRSVRAGTVWVNCYFAFDPDAPFGGYKMSGFGRDQGLAAMDKYLQVKSVITALPDSPWY

SEQ ID NO: 11151 - protein, 371 aa, Methanocaldococcus jannaschii
  misc_feature (45)..(45): Xaa can be any naturally occurring amino acid
MFISYWLLQNVFERHYIKKFLVLSMMKVCVIEGDGIGKEVIPEAXKILNELGEFEIIKGEAGLECLKKYGNALPEDTIEKAKEADIILFGAITSPKPGEVQNYKSPIITLRKMFHLYANVRPINNFGIGQLIGKIADYEFLNAKNIDIVIIRENTEDLYVGRERLENDTAIAERVITRKGSERIIRFAFEYAIKNNRKKVSCIHKANVLRITDGLFLEVFNEIKKHYNIEADDYLVDSTAMNLIKHPEKFDVIVTTNMFGDILSDEASALIGGLGLAPSANIGDDKALFEPVHGSAPDIAGKGIANPMASILSIAMLFDYIGEKEKGDLIREAVKYCLINKKVTPDLGGDLKTKDVGDEILNYIRKKLKGY

SEQ ID NO: 11152 - protein, 337 aa, Methanocaldococcus jannaschii
MVISMHKICVIEGDGIGKEVVPATIQVLEATGLPFEFVYAEAGDEVYKRTGKALPEETIETALDCDAVLFGAAGETAADVIVKLRHILDTYANIRPVKAYKGVKCLRPDIDYVIVRENTEGLYKGIEAEIDEGITIATRVITEKACERIFRFAFNLARERKKMGKEGKVTCAHKANVLKLTDGLFKKIFYKVAEEYDDIKAEDYYIDAMNMYIITKPQVFDVVVTSNLFGDILSDGAAGTVGGLGLAPSANIGDEHGLFEPVHGSAPDIAGKKIANPTATILSAVLMLRYLGEYEAADKVEKALEEVLALGLTTPDLGGNLNTFEMAEEVAKRVREE

SEQ ID NO: 11153 - protein, 154 aa, Zea mays
GRVGKFGSSFRFGLEAGSKPEILLAMSCLCKGSPDAFLVCNGFKDAEYISLALLGRKLALNTVIVLEQEEELDLVIELSQKMNVRPVIGLRAKLRTKHSGHFGSTSGEKGKFGLTTTQIVRVVRKLRQSGMLDCLQLLHFHIGSQIPSTSLLSD

SEQ ID NO: 11154 - protein, 336 aa, Mycobacterium avium subsp. paratuberculosis str. k10
MKLAVIGGDGIGPEVTAEALKVLDAVLPGVDKTEYDLGARRYHATGELLPDSVIDELRAHDAILLGAIGDPSVPSGVLERGLLLRLRFELDHHINLRPGRLYPGVSSPLAGNPDIDFVVVREGTEGPYTGTGGAIRVGTPNEVATEVSQNTAFGVRRVVVDAFERARRRRKHLTLVHKTNVLTFAGKLWSRIVAEVGRDYPDVEVAYQHIDAATIFMVTDPGRFDVIVTDNLFGDIITDLSAAVCGGIGLAASGNIDGTRTNPSMFEPVHGSAPDIAGQGIADPTAAIMSVALLLAHLGEDAAATRVDRAVERYLATRGNERPATTEVGERIAAAL

SEQ ID NO: 11155 - protein, 314 aa, Pseudomonas resinovorans
MPSLSLRIERIDPLTPRIRRLILVADAQQPLPGFTPGAHIEIQIAGSKPQWRAYSLVNLPGHAHYEIAVQLEEQSSGGSRWIHQLQVGQPLQVRAPKNHFPLVTQASDYLLIAGGIGITPMLGMARALAAGQQPFTLHYAGREAQGMAYLEEVRALGSAHCWISGGDPARRLPLASLLATPHNGRQLYVCGPKALIASVLHSARELGWDDSHVHSELFTGSLDAAGDASFEVELRSSGITLQVPAGKSVLEAMLDADLDPLFDCRRGDCGVCVAQVLEGSAEHRDICLSARERSDGRFCTCVSRASSARLVLDL

SEQ ID NO: 11156 - protein, 425 aa, Bacillus cereus ATCC 10987
MKNERIEKLQESWELDTRWKGITRPYSAEDVIRLRGSIDIEHTLARRGAEKLWASLHTEDYINALGALTGNQAMQQVKAGLKAIYLSGWQVAADANLSGHMYPDQSLYPANSVPAVVKRINQTLQRADQIQHMEGSGDTDYFVPIVADAEAGFGGQLNVFELMKGMIEAGASGVHFEDQLSSEKKCGHLGGKVLLPTQTAVRNLISARLAADVMGVPTIIVARTDADAADLITSDIDPVDKAFITGERTPEGFYRTKAGLDQAIARGLAYAPYADLVWCETSEPNLEDAKRFAEAIHKEHPGKLLAYNCSPSFNWKQKLDEKTIASFQKEIASYGYKFQFVTLAGFHSLNYGMFELARGYKERGMAAYSELQQAEFAAEKHGYSATRHQREVGTGYFDEVAQVITGGTSSTTALKGSTEEAQFTK

SEQ ID NO: 11157 - protein, 177 aa, Cicer arietinum
LDIAVRLLEPLKEQFPIISYADFYQLGGVVAVEVTGGPEVPFHPGREDKPEPPPEGRLPDATKGSDHLRDVFGKAMGLSDQDIVALSGGHTIGAAHKERSGFEGPWTSNPLIFDNSYFTELLNGEKEGLLKLPSDKALLSDPVFRPLVEKYAADEDAFFADYAEAHLKLSELGFAEA

SEQ ID NO: 11158 - protein, 141 aa, Arabidopsis thaliana
MADTPSSPAGDGGESGGSVREQDRYLPIANISRIMKKALPPNGKIGKDAKDTVQECVSEFISFITSEASDKCQKEKRKTVNGDDLLWAMATLGFEDYLEPLKIYLARYRELEGDNKGSGKSGDGSNRDAGGGVSGEEMPSW

SEQ ID NO: 11159 - protein, 316 aa, Escherichia coli
TDKLTSLRQYTTVVADTGDIAAMKLYQPQDATTNPSLILNAAQIPEYRKLIDDAVAWAKQQSNDRAQQIVDATDKLAVNIGLEILKLVPGRISTEVDARLSYDTEASIAKAKRLIKLYNDAGISNDRILIKLASTWQGIRAAEQLEKEGINCNLTLLFSFAQARACAEAGVFLIAPFVGRILDWYKANTDKKEYAPAEDPGVVSVSEIYQYYKEHGYETVVMGASFRNIGEILELAGCDRLTIAPALLKELAESEGAIERKLSYTGEVKARPARITESEFLWQHNQDPMAVDKLAEGIRKFAIDQEKLEKMIGDLL

SEQ ID NO: 11160 - protein, 411 aa, Haemophilus influenzae 86-028NP
  misc_feature (27)..(27): Xaa can be any naturally occurring amino acid
MSDPVILPLGIAAFTVIVLVLVAIILXAKSKLVDSGDITIDINDDPEKAITLPAGGKLLGALASKGIFVSSACGGGGSCGQCIVKVKNGGGEILPTELSHINKREAKEGYRLACQVNVKGNMEVELPEEIFGVKKWECTVISNDNKATFIKELKLAIPEGEEVPFRAGGYIQIEAEPHVVNYKDFDIPEEYHEDWDKYDLWRYVSKVDEHIIRAYSMASYPEEKGIIMLNVRIATPPPRQPDAPPGQMSSYIWSLKAGDKVTISGPFGEFFAKETNAEMVFIGGGAGMAPMRSHIFDQLKRLHSKRKMSFWYGARSKREIFYQEDFDQLQAENPNFVWHVALSDALPEDNWTGYTGFIHNVLYENYLKNHEAPEDCEYYMCGPPVMNAAVIKMLKDLGVEDENILLDDFGG

SEQ ID NO: 11161 - protein, 170 aa, Zea mays
MAPTVMMASSATAVAPFQGLKSTASLPVARRSSRSLGNVSNGGRIRCMQVWPAYGNKKFETLSYLPPLSTDDLLKQVDYLLRNGWIPCLEFSKVGFVYRENSTSPCYYDGRYWTMWKLPMFGCNDATQVYKELQEAIKSYPDAFHRVIGFDNIKQTQCVSFIAYKPPGSD

SEQ ID NO: 11162 - protein, 353 aa, Nicotiana tabacum
MEVISTNTNGSTIFKSGAIPMNGHHNGTSKHQNGHKNGTSEQQNGTISLDNGNELLGNSNCIKPGWFSEFSALWPGEAFSLKVEKLLFQGKSDYQDVMLFESATYGKVLTLDGAIQHTENGGFPYTEMIVHLPLGSIPNPKKVLIIGGGIGFTLFEMLRYPTIEKIDIVEIDDVVVDVSRKFFPYLAANFNDPRVTLVLGDGAAFVKAAQAEYYDAIIVDSSDPIGPAKDLFERPFFEAVAKALRPGGVVCTQAESIWLHMHIIKQIIANCRQVFKGSVNYAWTTVPTYPTGVIGYMLCSTEGPEIDFKNPVNPIDKETAQVKSKLAPLKFYNSDIHKAAFILPSFARSMIES

SEQ ID NO: 11163 - protein, 158 aa, Brassica rapa subsp. pekinensis
TMGISVKEFPWIKGFNFDVPHVVQVAQVLDGVENVGGDMFDSVPKCDAVLIKWVLHDWGDRDCIRILKNCKEAVPPNIGKVLIVESVIREKKKAMIVEDRDEKLEHVRLMLDMVMMAHTTTGKERTLKEWDFVLNEAGFARYEVRDIDDVQCVIIAYR

SEQ ID NO: 11164 - protein, 375 aa, Nicotiana tabacum
MEVISTNTNGSTIFKNGAIPMNGHQNGTSEHLNGYQNGTSKHQNGHQNGTFEHRNGHQNGTSEQQNGTISHDNGNELLGSSDSIKPGWFSEFSALWPGEAFSLKVEKLLFQGKSDYQDVMLFESATYGKVLTLDGAIQHTENGGFPYTEMIVHLPLGSIPNPKKVLIIGGGIGFTLFEMLRYPSIEKIDIVEIDDVVVDVSRKFFPYLAANFNDPRVTLVLGDGAAFVKAAQAGYYDAIIVDSSDPIGPAKDLFERPFFEAVAKALRPGGVVCTQAESIWLHMHIIKQIIANCRQVFKGSVNYAWTTVPTYPTGVIGYMLCSTEGPEVDFKNPVNPIDKETTQVKSKLGPLKFYNSDIHKAAFILPSFARSMIES

SEQ ID NO: 11165 - protein, 178 aa, Glycine max
MASSMISSPAVTTVNRAGAGMVAPFTGLKSMAGLPTRKTNNDITSIASNGGRVQCMQVWPPVGKKKFETLSYLPDLDDAQLAKEVEYLLRKGWIPCLEFELEHGFVYREHNRSLGYYDGRYWTMWKLPMFGCTDASQVLKELQEAKTAYPNGFIRIIGFDNVRQVQCISFIAYKPPSF

SEQ ID NO: 11166 - protein, 536 aa, Zea mays
MGNCCRSPAAVAREDVSSSHFPASNAKKKPHQARNGGGAGQKRLSVLGDEGCEVVGIDDKYVLDRELGRGEFGVTYLCMDRGTKELLACKSISKRKLRTAVDVEDVRREVAIMRHLPKSPSVVSLREACEDDGAVHLVMELCEGGELFDRIVARGHYTERAAASVTRTILEVVQLCHRHGVIHRDLKPENFLFANKKENSPLKAIDFGLSIFFKPGEKFSEIVGSPYYMAPEVLKRNYGPEIDIWSAGVILYILLCGVPPFWAETEQGVAQAILRGNIDFKREPWPNVSENAKDLVRHMLEPDPKLRLTAKQVLEHHWLQNAKKAPNVPLGDIVKSRLKQFSRMNRFKRRALRVIADHLSAEEVEDIKDMFKTMDTDNDGIVSYEELKTGIAKLGSHLAESEVQMLIEAVDTNGRGALDYGEFLAVSLHLQRMANDEHLRRAFLFFDKDGNGFIEPEELREALVDDGAADSMEEVVNDILQEVDTDKDGKISYEEFVAMMKTGTDWRKASRHYSRGRFNSLSMKLIKDGSVKLGVE

SEQ ID NO: 11167 - protein, 161 aa, Pseudomonas aeruginosa PAO1
MSDSLLSIPCTTIKGEQKTLADFGGKALLVVNTASKCGFTPQYQGLEALWEKYRERGLVVLGFPCNQFGKQEPGDEGEISQFCELNYGVSFPLFRKIEVNGAGAHPLFVSLKKRAPGLLGSQGIKWNFTKFLIGRDGQVVKRYAPTTKPEELSSAIEALLE

SEQ ID NO: 11168 - protein, 112 aa, uncultured Bartonella sp.
ANEACLKMLQEIGSVERIPEFIARAKDKNDSFRLMGFGHRVYKNYDPRAKIMQQTCHEVLKELNIQNDPLLDIAITLENIALNDEYFIEKKLYPNVDFYSGITLKALGFPTE

SEQ ID NO: 11169 - protein, 159 aa, Triticum aestivum
  misc_feature (10)..(10): Xaa can be any naturally occurring amino acid
  misc_feature (43)..(43): Xaa can be any naturally occurring amino acid
  misc_feature (51)..(51): Xaa can be any naturally occurring amino acid
  misc_feature (66)..(66): Xaa can be any naturally occurring amino acid
  misc_feature (84)..(84): Xaa can be any naturally occurring amino acid
  misc_feature (90)..(90): Xaa can be any naturally occurring amino acid
  misc_feature (99)..(99): Xaa can be any naturally occurring amino acid
  misc_feature (112)..(112): Xaa can be any naturally occurring amino acid
  misc_feature (122)..(122): Xaa can be any naturally occurring amino acid
  misc_feature (129)..(129): Xaa can be any naturally occurring amino acid
  misc_feature (136)..(136): Xaa can be any naturally occurring amino acid
  misc_feature (153)..(153): Xaa can be any naturally occurring amino acid
  misc_feature (155)..(155): Xaa can be any naturally occurring amino acid
MSDSEEHHFXSKADAGASKTYPQQAGTVRKNGFIVIKNRPCKXVEVSTSKXLGKHGHAKCHFVAIXHIPMGKKLEDIVPSSHNXDIPACXPLLNYQLIXIFPEDGFVTLLTXDGNTKDDLRXPTDEILXAQIKEGXKTGRSVVTSICMGEDKXAXEGFQ

SEQ ID NO: 11170 - protein, 202 aa, Arabidopsis thaliana
MTETHRTTTTFLDLLRRQMSGHDLTRRKRTLKERLRFKCIGCCGPTWNLRLTNNTTLHSPTSRDDEIEELQIETGLVLESDHGSGTGMNLATALEAERYNRGESTEAEADMTPRRVSLMRLLEETAEKIVDDDGKETEILTASIGTLTGNDSVCCVCMGRKKGAAFIPCGHTFCRVCSRELWLNRGSCPLCNRPIIEILDIF

SEQ ID NO: 11171 - protein, 322 aa, Neurospora crassa
MNSATSNFEVDATGVSPKQIHNLIPSLKLSDGNEIPMLGYGLGTANYKSGDSADTISEPIVNATLTALNAGYAHLDGAEVYGNEVELGRAIAQSKLPRSSLYITTKTIVRAGDTVTQSFNRSLEKLGLDYVDLYLLHSPFFAKNPEQLQAAWREMEKIKDSGMAKSIGVSNFLISHLQTLFDIPGGLQYPPVVNQIEYHPYLQHVVEGEDLVAFCREKHIAIAAYSPLTAITKARPGPVDPIYTQLAKKYGVSEAEIAFRWCLDQGIVTLTTSSNEERLKGYLKKLPSFKLTPKEVEDIASAGKEKHYRVWWTEEFAGDDRH

SEQ ID NO: 11172 - protein, 344 aa, Mesorhizobium sp. BNC1
MTNMMKALVKAKPEEGLWMERVPLPEIGPNDVLIKVRKAAICGTDVHIWNWDEWARKTVPVPLVTGHEFVGEVVDVGSAVTEYRIGQRVSGEGHIVCGHCRNCRAGRGHLCRNTLGVGVHRPGAFAEYISLPQHNVVAIPDDVPDEIAAIFDPLGNAVHTALSFDLVGEDVLVTGAGPIGIMGALVAQCVGARKVVITDINPGRLALAKKLGVRHVVNAREEKLTDVMRKLGMTEGFDVGLEMSGSASAFRDMIDVMNNGGKIAILGIAPTGFEIDWNKVIFKMLHLKGIYGREMFETWYKMIALVQGPLDISGLITHRISADDYREGFAAMRSGEAGKVVMDW

SEQ ID NO: 11173 - protein, 434 aa, Agrobacterium tumefaciens str. C58
MGERSMTDFYKLVPGAPKGRFDGIERTYTAADVARLRGSVEIRHSLAEMGANRLWKLINEENFVNALGALSGNQAMQMVRAGLKAIYLSGWQVAADANTASAMYPDQSLYPANAAPELAKRINRTLQRADQIETAEGKGLSVDTWFAPIVADAEAGFGGPLNAFEIMKAFIEAGAAGVHYEDQLASEKKCGHLGGKVLIPTAAHIRNLTAARLAADVMGVPTLVIARTDAEAAKLLTSDIDERDQPFVDYDAGRTVEGFYQVKNGLEPCIARAVAYAPYCDLIWCETSKPDLEQARRFAEGVHKVHPGKKLAYNCSPSFNWKKNLDDATIAKFQRELGAMGYKFQFITLAGFHQLNFGMFELARGYKDRQMAAYSELQEAEFAAEVNGYTATKHQREVGTGYFDAVSLAISGGTSSTTAMKESTEHDQFRPAAE

SEQ ID NO: 11174 - protein, 133 aa, Neurospora crassa
MNAPDRFELFLLQDGEKKIEEKVFTGMSNTSDFKILKEDHTLGNLLAEHLKQAPHVLMAGYKIAHPNVPELFIRIQTDGSITPREALVGACKQLVAMYGQLGREFQKELALRQYADQGEQGGGVNGGANGGHY

SEQ ID NO: 11175 - protein, 240 aa, Triticum aestivum
MGGGVMRTAAAAPLLSAAGEIPPVAPAGSQWASWEVDDWEFADWRSESASEADVAVVGGPRLVFAPPSREEAEEATAELREAIDRVYFKETPVEVVKEHDQELSKLGADALIPAMPGHVVQAFTLLKSSPEAQSVVASLASDKNVWDAVLKNERVMEFYKSHQQTLVNTFPEGTDSTDSVESPEKFEEASPEYALPTASPLSDFVDNAKKTMMEMVDNITNFFQRLFHNPAKLKPDRVIL

SEQ ID NO: 11176 - protein, 237 aa, Arabidopsis thaliana
MEGVGARLGRSSTRYGPATVFTGPVRKWKKKWVHVSPSSKKDNNNSSSGSAAAAASVVNGGSNSDGSNGSHLLLYKWAPLSQNGNGNEDGKSESNSPSEDTVATVAEDPPRRRFKYVPIAVLEEQKKEITEIEEDDKIEEDDKIDEDNKVEQEDKVDEDKTVEESSEKKAEVEVEEKPDINDVPMEDIQVEEKIVQDDEEKVVRQDLNESTVDLGLNLNANDADAENDPKEDKPLEE

SEQ ID NO: 11177 - protein, 129 aa, Brassica napus
  misc_feature (87)..(87): Xaa can be any naturally occurring amino acid
  misc_feature (104)..(104): Xaa can be any naturally occurring amino acid
MIREIPSLQNDNVSIQDHTSSNIKNRNTMDMRRDNRQDMTFRGPTQDQMMSKQEYLQTLSSQNSTRRLITKSSYFSLESMVVLVGLXASLLFLPLILPPLPPPXPFMLLLVPIGIMVLLMVLALMPSSN

SEQ ID NO: 11178 - protein, 202 aa, Cicer arietinum
MNPEYDYLFKLLLIGDSGVGKSCLLLRFADDSYLDSYISTIGVDFKIRTVEQDGKTIKLQIWDTAGQERFRTITSSYYRGAHGIIVVYDVTDQESFNNVKQWLNEIDRYASENVNKLLVGNKCDLAANKVVSSETAKAFADEIGIPFMETSAKNATNVEQAFMAMAAEIKNRMASQPANNARPPTVQIRGQPMNQKSGCCST

SEQ ID NO: 11179 - protein, 280 aa, Pyrococcus horikoshii OT3
MRDMEFIEWYPRGYGVAFKVKRKILEEQSEYQKIEVYETEGFGKLLAIDGTVQLVTEGEKSYHEPLVHPAMLAHPNPRRVLIIGGGDGGAIREVLKHEEVEEVIMVEIDKKVIEISAKYIGIDGGILEKMLSDKHEKGKLIIGDGVKFIEENSGFDVIIVDSTDPVGPAEMLFSEEFYKNAYRALNDPGIYVTQAGSVYLFTDEFLTAYRKMRKVFDKVYYYSFPVIGYASPWAFLVGVKGSIDFMKVDAEKGKKLGLEYYDPDKHETLFQMPRYIVQML

SEQ ID NO: 11180 - protein, 197 aa, Cicer arietinum
MSGSRFIKCVTVGDGAVGKTCLLISYTSNTFPTDYVPTVFDNFSANVVVDGSTINLGLWDTAGQEDYNRLRPLSYRGADVFLLAFSLISRASYENIAKKWIPELRHYAPGVPIILVGTKLDLRDDKQFFQDHPGAVPITTAQGEELRKLIGAPVYIECSSKTQKNVKAVFDAAIKVVLQPPKQKKTKRKGQKACSIL

SEQ ID NO: 11181 - protein, 343 aa, Mycobacterium avium subsp. paratuberculosis str. k10
MRIGVLTGGGDCPGLNAVIRAVVRTCDSRYGSSVVGFQDGWRGLLENRRIQLHNDDRNDRLLAKGGTMLGTARVHPDKLRAGLNQIKQTLDDNGIDVLIPIGGEGTLTAAHWLSEENVPVVGVPKTIDNDIDCTDVTFGHDTALTVATDAIDRLHSTAESHQRVMLVEVMGRHAGWIALNAGLASGAHMTLIPEQPFDVEEVCRLVKRRFQRGDSHFICVVAEGAKPIPGSISLREGGIDEFGHERFTGVAAQLGAEVEKRINKEVRVTVLGHVQRGGTPTAYDRVLATRFGVNAADAAHAGEYGQMVSLRGQDIGRVPLADAVRQLKLVPESRYDDAAAFFG

SEQ ID NO: 11182 - protein, 381 aa, Nicotiana tabacum
MEVISTNTNGSTIFKNGAIPMNGYQNGTSKHQNGHQNGTSEHRNGHQNGISEHQNGHQNGTSEHQNGHQNGTISHDNGNELQLLGSSNSIKPGWFSEFSALWPGEAFSLKVEKLLFQGKSDYQDVMLFESATYGKVLTLDGAIQHTENGGFPYTEMIVHLPLGSIPNPKKVLIIGGGIGFTLFEMLRYPTIEKIDIVEIDDVVVDVSRKFFPYLAANFSDPRVTLVLGDGAAFVKAAQAGYYDAIIVDSSDPIGPAKDLFERPFFEAVAKALRPGGVVCTQAESIWLHMHIIKQIIANCRQVFKGSVNYAWTTVPTYPTGVIGYMLCSTEGPEVDFKNPVNPIDKETTQVKSKLAPLKFYNSDIHKAAFILPSFARSMIES

SEQ ID NO: 11183 - protein, 446 aa, Corynebacterium diphtheriae NCTC 13129
MARSVVVWFRDDLRVHDNPALMKAWELVRANPADLHAVYIANEVGVRPLGGAVKWWLHHSLLALSEQLAQRGVRLHVLSGDPLTLLPQLVTSCGATAVTMNRRYDPAARSIDDAFVADASAHDVEVYDFPCHLLAEPGEITTTTGGSYKVFTPFSRNLRDAIGDLPLDTLAAPPKAEQPIDDTETQAAIADLGWDAWWAASISKAWTPGEPAAREALAELDDILPRYLDDRDRPDIDGTSRLSPRLRFGELSVAEVWNHAHTSEGFRRQLMWRDFAWHRLDAHPDMATANIRPEFDHFPWDGGDFEAELNAWRHGRTGIALVDAGMRELWATGTMHNRVRMVAASLLVKNLGIHWRHGEQWFWDTLVDADPASNPFNWQWVAGSGDDAAPYFRIFNPDTQARRFDPDGTYRTRWLPIMSADYPEEAIVDLKESRLRALDAYNACKR

SEQ ID NO: 11184 - protein, 419 aa, Nicotiana tabacum
MEVISTNTNGSTIFKNGAIPMNGHQSGTSKHLNGYQNGTSKHQNGHHNGTSEHRNGHQNGISEHQNGHQNGTSEHRNGHQNGISEHQNGHQNGTSEHQNGHQNGTSEQQNGTISHDNGNELLGNSNSIKLGWFSEFSALWPGEAFSLKVEKLLFQGKSDYQDVMLFESATYGKVLTLDGAIQHTENGGFPYTEMIVHLPLGSIPNPKKVLIIGGGIGFTLFEMLRYPTIEKIDIVEIDDVVVDVSRKSFPYLAANFNDPRVTLVLGDGAAFVKAAQAGYYDAIIVDSSDPIGPAKDLFERPFFEAVAKALRPGGVVCTQAESIWLHMHIIKQIIANCRQVFKGSVNYAWTTVPTYPTGVIGYMLCSTEGPEVDFKNPINPIDKETTQVKSKLAPLKFYNSDIHKAAFILPSFARSMIES

SEQ ID NO: 11185 - protein, 431 aa, Leptospira interrogans serovar Copenhageni str. Fiocruz L1-130
METKIQNFGECSIPSPADYEYYTSDTSRLIFRTVFQSKEDWNSYVQEGPDFFEQAGPREKIYFNPQEVTAGIVTCGGLCPGINDVIRGIVMELYYRYGVSRILGFPYGYQGLVKRYSHQPIELTPEKVAHIVDEGGSMLSSSRGNQSPEEMVDSLSFYGVKILFCIGGDGTLRGARTIVDEIAKRKEKISVVGIPKTIDNDINYVQKTFGFSTAFSKAMEAVECAHVEAKGAPNGIGLVKLMGRHSGFIAVNAALASRNVNYCLIPEVDFDLFGNEAFLDDLKKRIQKKGHAVIIVAEGAGQKFFDSTEERDSSGNLKLKDIGLFLKDTMTEFFKKENIPVNIKYIDPSYIIRSIPANAEDSVFCGFLAQNAVHAGMAGKTDMVVGMWNNVFTHLPISVAIQERKVLQPDRSTLWRSLLASTGQPAHMLAK

SEQ ID NO: 11186 - protein, 490 aa, Erwinia carotovora subsp. atroseptica SCRI1043
MSRYGLQQLYINGAYVDSTGNDTFDAVNPANGDIIACIQSATAADVDRAVSAATAGQKVWAAMTAMERSRILRRAVDILRERNDELALLETHDTGKPLSETRTVDIVTGADVLEYYAGLIPMLEGQQIPLRDTSFVYTRREPLGVVAGIGAWNYPIQIALWKSAPALAAGNAMIFKPSEVTSLTALKLAEIYTEAGLPAGVFNVLTGTGKSVGQALTTHPGIAKVSFTGGIASGKTVMANAAGSTLKDVTMELGGKSPLIIFDDADLDKAADIAMMANFFSSGQVCTNGTRVFVPKALQAQFEEKILACVQRIRAGDPTDESVNFGPLVSFPHRESVLRYIESGKREGARVLVGGEPMTDGDYAQGAYVAPTVFTDCRDDMKIVRKEIFGPVMSILTYQDEDEVIRRANDSEYGLAAGIVTRDLNRAHRVIHQLEAGICWINTWGESPAEMPVGGYKHSGVGRENGVTTLEHYTQIKSIQVELGEFRSVF

SEQ ID NO: 11187 - protein, 473 aa, Populus tremula x Populus tremuloides
MSNQKHGEEAMVSSFNDTEHEEKEEVSKDESGFRLKSLLWHGGSVYDAWFSCASNQVAQVLLTLPYSFSQMGMLSGIILQIFYGFLGSWTAYLISVLYVEYRSRKEKENVNFKNHVIQWFEVLDGLLGPTWKAVGLAFNCTFLLFGSVIQLIACASNIYYIDDKFDKRTWTYIFGACCATTVFIPSFHNYRIWSFLGLGMTTYTAWYMTIASLVHGQVDGVTHSGPAKAVLYFTGATNILYTFGGHAVTVEIMHAMWKPQRFKYIYLLATLYVFTLTLPSAAATYWAFGDQLLTHSNAFSLLPRTGWRDAAVILMLIHQFITFGFACTPLYFVWEKVIGMHDTKSILLRALCRLPVVIPIWFFAIIFPFFGPINSAVGALLVTFTVYIIPALAHMLTYRSASARQNAVEKPPVFLPSWTAMYVLNAFIVVWVLVVGFGLGGWASMSNFIKQVDTFGLFAKCCQCPRSAAAKHH

SEQ ID NO: 11188 - protein, 79 aa, Glycine max
  misc_feature (72)..(72): Xaa can be any naturally occurring amino acid
MATAMIAWAAVTTADRADPRMHAPFTGLKSMAGFTTRKTNHDISSIATNAVRVLCMHEWTPVLMKKYETLYXLPDLDDP

SEQ ID NO: 11189 - protein, 292 aa, Zea mays
MASSSRSTVFSLLLLVALLLSCSGMSSAARLLEEAPPKEEHPHPAVPELPEPELPPHPTDVVPPELPKPELPPHPAVVPELPKPEVPHPVPEQPKPELTPHPAAVPELPKPEVPHPTAVPELPKPEVPHPVPELPKPEVPPHPTAVPELPKPEVPHPVPELPKPELTPHPAAVPELPKPEVPHPVPELPKPEVPPHPTAVPELPKPEVPHPVPELPKPELPPHPVVPELPKPEVPHPVALELPKPELPPHPTVPKLPHPEVPEVPNHELPPLPKAELPPKPEGHYPEPEAKP

SEQ ID NO: 11190 - protein, 479 aa, Rubrivivax gelatinosus PM1
MVTEYRNYIDGEFLANRSGALIDVHNPATHELLARVPDAPNDVVDLAVQAARTAQPGWAKLPAIQRAQHLRAIAARLRENVEELAHTITAEQGKVLGLARVEVNFTADYMDYMAEWARRLEGEVLTSDRVGESIFLMRKPIGVAAGILPWNFPFFLIARKLAPALITGNTIVIKPSEITPINAFEFARLASQTDLPRGVFNLVGGTGAGAGAQLTSHRDVGIVSFTGSVETGTRIMTAASKNLTRVNLELGGKAPAIVLADADLDLAVKAIYDSRVINTGQVCNCAERVYVQRKVADEFTSKIAARMAGTLYGDPLAQPDVAMGPLVSQAGLDKVAGMVDRARAAGASIVQGGRKANRDKGYHYEPTVIANCSADMEIMRKEIFGPVLPIQVVDELDEAIALANDSDYGLTSSIFTKDLNSAMRAVRDLQFGETYVNREHFEAMQGFHAGRKKSGIGGADGKHGLYEFTETHVVYIQHG

SEQ ID NO: 11191 - protein, 120 aa, Aerides japonica
MARSTASMAVVCIVSFLLVSGVFREASGTITCGQVVSTLTPCISYIRGDSTLPQTCCSGVKKLNALASTSPDRQGACSCLKNLASHIPNLNPARAAGLPGNCGVSVPYPISTSTDCSKVR

SEQ ID NO: 11192 - protein, 399 aa, Bacillus cereus G9241
MLENQINERSLLLHKELVGKIEITSKVEVNSADDLSLTYTPGVAESCKAIAADEETVYDYTARGNMVAVVSDGTAVLGLGNIGPKAAMPVMEGKSILFKKFANVDAFPLCLGTTDVDEIVTLVKNLEPTFAGINLEDIAAPRCFEIEKRLKEETSIPVFHDDQHGTAIVVLAAVINALKVVSKQMDHVKIVINGAGSAGIAIGKLLLKAGAKHITLVSLEGIVCEGEAWMNEAQIEVSKKTNREHVRGTLKEAIHQADIFIGVSAPNVLTKELVKTMNEKAIVFAMANPIPEIFPEDALEAGAAVVGTGRSDYANQVNNVLAFPGIFRGALDVRATDITEEMKLAAAYGIANIITDEERNANYVIPNPLDKRVVPSVAEAVAKAAIDSGVAQITKIPSY

SEQ ID NO: 11193 - protein, 497 aa, Emericella nidulans
MSDLFTTIETPVIKYEQPLGLFINNEFVKGVEGKTFQVINPSNEKVITSVHEATEKDVDVAVAAARAAFEGPWRQVTPSERGILINKLADLMERDIDTLAAIESLDNGKAFTMAKVDLANSIGCLRYYAGWADKIHGQTIDTNPETLTYTRHEPVGVCGQIIPWNFPLLMWSWKIGPAVAAGNTVVLKTAEQTPLSALYAAKLIKEAGFPAGVINVISGFGRTAGAAISSHMDIDKVAFTGSTLVGRTILQAAAKSNLKKVTLELGGKSPNIVFDDADIDNAISWVNFGIFFNHGQCCCAGSRILVQEGIYDKFVARFKERAQKNKVGNPFEQDTFQGPQVSQLQFDRIMEYINHGKKAGATVATGGDRHGNEGYFIQPTVFTDVTSDMKIAQEEIFGPVVTIQKFKDEAEAIKIGNSTDYGLAAAVHTKNVNTAIRVSNALKAGTVWINNYNMISYQAPFGGFKQSGLGRELGSYALENYTQIKTVHYRLGDALFA

SEQ ID NO: 11194 - protein, 550 aa, Triticum aestivum
  misc_feature (257)..(257): Xaa can be any naturally occurring amino acid
  misc_feature (267)..(267): Xaa can be any naturally occurring amino acid
  misc_feature (297)..(297): Xaa can be any naturally occurring amino acid
  misc_feature (327)..(327): Xaa can be any naturally occurring amino acid
MAAAATRRAASSLASRCLLARPAASPAAVPSALRRADGARGLLPGLLQRFGTAAAAEEPISPSVQVGETQLLINGKFVDAASGKTFPTVDPRTGEVIARVAEGDAEDVDRAVVAARKAFDEGPWPRMTAYERSRILLRFADLIEKHNDDIAALETWDNGKPYEQAAHIEVPMLARLMRYYAGWTDKIHGLIVPADGPHHVQVLHEPCWGLWADHPVELPTFDVRLVTAPGPRNWQLLHEPIGVVGQIIPWNFPLLMXAAELALLLPXDSTMVLTYSRQTPLSAHCVSKLLHEAGLPXGVLNIVSGFRPNSWAALASHMDVDKIAFTXDDADIDQAVELAHFALFFNQGQCCCAGSRTFVHERVYDEFVEKSKARALKRVVGDPFRKGVEQGPQIDDEQFKKILRYIKSGVDSGATLVTGGDKLGDKGYYIQPTIFSDVQDGMKIAQEEIFGPVQSIFKFNDLNEVIKRANASQYGLAAGVFTNNLDTANTLTRALRAGTVWVNCFDIFDAAIPFGGYKMSGIGREKGIDSLKNYLQVKAVVTALKNPAWL

SEQ ID NO: 11195 - protein, 497 aa, Emericella nidulans
MSDLFTTIETPVIKYEQPLGLFINNEFVKGVEGKTFQVINPSNEKVITSVHEATEKDVDVAVAAARAAFEGPWRQVTPSERGILINKLADLMERDIDTLAAIESLDNGKAFTMAKVDLANSIGCLRYYAGWADKIHGQTIDTNPETLTYTRHEPVGVCGQIIPWNFPLLMWSWKIGPAVAAGNTVVLKTAEQTPLSALYAAKLIKEAGFPAGVINVISGFGRTAGAAISSHMDIDKVAFTGSTLVGRTILQAAAKSNLKKVTLELGGKSPNIVFDDADIDNAISWANFGIFFNHGQCCCAGSRILVQEGIYDKFVARFKERAQKNKVGNPFEQDTFQSPQVSQLQFDRIMEYINHGKKAGATVATGGDRHGNEGYFIQPTVFTDVTSDMKIAQEEIFGPVVTIQKFKDEAEAIKIGNSTDYGLAAAVHTKNVNTAIRVSNALKAGTVWINNYNMISYQAPFGGFKQSGLGRELGSYALENYTQIKTVHYRLGDALFA

SEQ ID NO: 11196 - protein, 285 aa, Burkholderia cepacia R1808
MSTTLLFHPTPDAAYGFPNARRLAHVASPHQHIEVWDTPQLGRLFTLDGRPMTSVGDEYVYHECMTHPAALAHPCPKKALVLGGGDGGAARQLLKHACIERIVVAELDDEVVGMARRYLDDVHQGALDDPRVEVVIGDAAQFVASTVEHFDLVVFDLTPPDSPAAGLYTREFYARLKRILTPRAALSMHLGSPLFHAARIAALLDDLRASFAFVDPLSAHVPLYGSQWLMAIASDTLDAAALFAHDVDERLAARRVHGLRYYDARLHAALFALPRALRDTLGGRR

SEQ ID NO: 11197 - protein, 252 aa, Zea mays
FQAGTGIAELIALEISKQTNAPIEECRKKVWLVDSKGLIVDSRKGSLQPFKKPWAHEHEPLKTLYDAVQSIKPTVLIGTSGVGRTFTKEIIEAMSSFNERPIIFSLSNPTSHSECTAEQAYTWSQGRSIFASGSPFAPVEYEGKTFVPGQSNNAYIFPGLGLGLVISGAVRVHEDMLLAASKALADQATQDNFEKGSIFPPFTSIRKISAHIAAAVAAKAYELGLATRLPPPSDLVKYAENCMYTPVYRNYR

SEQ ID NO: 11198 - protein, 491 aa, Pseudomonas putida
MKHYRNYVNGKWTESSRTFDDVSPVDGSLVAIVHEASRELVDEAVKSGHQALSGEWGRTTATQRVALLRRIADEMERRQGDFLAAEMADTGKPHSMASSIDVPRGIANFRTFADILATAPVDSHRLDLADGAYALNYSARKPLGVVGVISPWNLPLLLMTWKVAPALACGNTVVVKPSEDTPGTATLLAEVMEAAGVPPGVFNLVHGFGPNSAGEFISSHPDISAITFTGESRTGTTIMRAAAEGVKPVSFELGGKNAAIIFADCDFDKMLDTMMRALFLNSGQVCLCSERVYVERPLYDRFCAALVERIKGMKIDWPQDPATQMGPLISAKHRDKVLGYFELARTEGATFLAGGGVPHFGDSRDDGAWVQPTVITGLGDDARSVREEIFGPICHVSVFDNEQEVIARANDTRYGLAATIWTSNLGRAHRVSEAMRVGISWVNTWFLRDLRTPFGGAGLSGIGREGGMHSLNFYSELTNVCIRIDEEVADV

SEQ ID NO: 11199 - protein, 182 aa, Triticum aestivum
MSDEAASPPGGGGGGGGGGSDDGGGGGGFGGVREQDRFLPIANISRIMKKAIPANGKIAKDAKETVQECVSEFISFITSEASDKCQREKRKTINGDDLLWAMATLGFEEYIEPLKVYLQKYRETEGDSKLAGKSGDVSVKKDALGPHGGASGTSAQGMGQQVAYNPGMVYMPPQSHNGDIST

SEQ ID NO: 11200 - protein, 211 aa, Paxillus involutus
MAEGSNYDFLFKVVLIGDSGVGKSNLLSRFTRNEFNLDSKSTIGVEFATRSINVDSKTVKAQIWDTAGQERYRAITSAYYRGAVGALLVYDISKHATYVNVTRWLKELRDHADSNIVIMLVGNKSDLKHLRAVPTEEAKNFSAENELSFIETSALDASNVESAFQTILTDVYRIVSTKSLEQSSDPIRAPTSDTIPVAIDSSAPTKNGSCC

SEQ ID NO: 11201 - protein, 419 aa, Rhodococcus ruber
AAERERMIWRVGDLLTQRAEEFGQLEALDNGKSAVIAAAVDTAWSADIFRYYAGWATKIEGSTVNVTMPFVPGGEFHAYTLREPVGVCGLIVPWNFPLLMAAFKLAPALAAGNTVILKPAEQTPLTALLLAEIFEEAGFPPGVVNIVPGFGDAGAALAAHDDVDKIAFTGSTEVGKKVVDAAKGNLKKVSLELGGKSPNIVFADADFDAAVQGSLDAWLFNHGQCCVAGTRLFVERPIFERFTEAVAEAASKVKIGPGLDPATQLGPLVSQEQLDRVTGYLREGLIDGARALTGGKRWGDKGFFVEPTVLVDVQPDFSVVREEIFGPVVNAMPFDADDGISAAANDSIYGLAAGIWTRDLSKAHRTARRLKAGSVWINQYNGFDTAMPFGGFKQSGWGRELGAGALDLYTQTKAVNIAL

SEQ ID NO: 11202 - protein, 375 aa, Zea mays
  misc_feature (362)..(362): Xaa can be any naturally occurring amino acid
RVTGKTKDEIEESISMVEILAVQLSKREAELLQQKEEVTKFAKSLKQASEDAKRIVEEERANAHTEIETAKGAVQRVQQAVQEHEKMSQNTGKQKQDMEELKKEVREARRIKMLHQPSKAMDLENEIRILRNTFAEKSKDCVSLLKELETHKRLKENGTIPSFDLEGLQCLGSMLRIVGLSGTHMDLSNISIQWFRIHPKESNKEIISGATRPVYALEPHDVGRYLQAEIDVGGEIAVAKTAGPVDPDAGLVDYVETLVRKPETEFNVVVLQSNGVDQPKESVHVLNVGRLRMRLTKGKSVVAKEFYSSSMQLCGVRGGGEAASQAMFWRPRNDLSLVLAFESTRERNTAIMLARRFAVDCXNIILAGPGDKTPW

SEQ ID NO: 11203 - protein, 413 aa, Aspergillus fumigatus
MPLTPEQVQIIKATVPVLAEHGTTITTVFYKNMLTAHPELNNVFNTTHQVTGHQARALAGALFAYASNIDNLGALGPAVELMCHKHASLYIKPDDYKIVGKFLLEAMGQVLGDALTPEILDAWATAYWQLADIMIGREAQLYEQAEGWTDFRDFVVALKVPESSEITSFYLKPADGKPLPAFQPGQYISVQVHVPELNYLQARQYSLSDMPRSDYYRISVKKESGLNPAEPGAKAHPGHVSNILHASVNEGDTIKVSHPFGDFFLSDAKAAHPVVLLSAGVGLTPMTSILNTLTSQAPERKVSFIHGARNARARAFKNHITSLEQKLPNLKSTFFTSHPTEEDKEGDDYQFRGRVDLSQLDSNRDLFLDDATTEYYVCGPDTFMTDMLNVLKSKGVSEDRVKLELFGTGGVPH

SEQ ID NO: 11204 - protein, 315 aa, Arabidopsis thaliana
MRIDLSVPKVGAELELNKVLGKGSSGSVSLIKYKSRLDGQTLYAAVKTSNIIHADSLLKEFQILSEFKGCSRIVQCYGTKVQETINEEGDVEFTIPMEYASGGSLRHFMSRFKDMKLPDALIRRFTRMILEGLAVIHGHGYVHCDLKPENILVFPSFELKISDFGLSKREGDSKWWLPSHPFAGTPVYMSPESISNGETRRGLDLWSLGCVVLEMYTGKRPWWDKNYDLGDLKKGSMPLISKDIPCDAKLFVMTCFASETNKRKNAFTLLRHCFLRGDVNKIIEPLVKSKNSNDIALELENIEHRLSQLRCISGG

SEQ ID NO: 11205 - protein, 150 aa, Lactobacillus delbrueckii subsp. lactis
  misc_feature (137)..(137): Xaa can be any naturally occurring amino acid
NREIYNFKPLREELIKAGHTFSTKADTEVILHGYEEWGMDGILKRVRGMFAFIIWDDNTQTMYGARDFFGIKPMYYQDVDGHLLVGSELKSFLPFPHFKKELNTEAVKPYLMNQYNDLKETFFKGVYRFQPGHWFEXKDGKMKTHQYWDA

SEQ ID NO: 11206 - protein, 222 aa, Triticum aestivum
  misc_feature (11)..(11): Xaa can be any naturally occurring amino acid
  misc_feature (31)..(31): Xaa can be any naturally occurring amino acid
FYKLLIDNVEXELLPVVYTPVVGEACQKYGXSIYRRPQGLYISLKDKGKVLEVLKNWPERSIQVIVVTDGERILGLGDLGCQGMGIPVGKLSLYTALGGVRPSACLPITIDVGTNNETLLNDEYYIGLRQRRATGEEYHELLQEFMNAVNLLPPHANQLKLQRRNLKHRLVFFCVRLCVCVLLCCSTLLCCTVMYCLREHGTHLSICVEVRHRRRRFFCQIS

SEQ ID NO: 11207 - protein, 357 aa, Triticum aestivum
  misc_feature (183)..(183): Xaa can be any naturally occurring amino acid
MGSMAAEMTAVEEEACIYAMQLSSTAVLPLTLKNAIELGMLEVLMGAGGKMLSPSEVAARLPPTTTNPDAPAMVDRMLHLLASYKVVSCEVEEGTHARRYGPTPVCKWFTPNQDGISMAPLLLLTNDKVPMESLYHLKDAVLDGGLPFHKAHGMTMYEYTKTDARLNRVFNEAMKGYTTIITXKLVDLYTGFHRIAILVDVGGGVGSTIRAVTSKYPHIKGINFDLPHVIAEAPQSPGVQHVAGDMFKNVPSGDAIILKWILHNWPDEHCTTLLKNCYGALPAQGKVVIVEGILPVKPEATSRGQQASLTDMIMLTHTAGGKERNQREFEELAMSAGFTSVKTAYIHSNTWVIEFTK

SEQ ID NO: 11208 - protein, 356 aa, Lactococcus lactis subsp. lactis Il1403
MRAARFYDRGDIRIDEINEPIVKAGQVGIDVAWCGICGTDLHEFLDGPIFCPSAEHPNPITGEVPPVTLGHEMSGVVNFIGEGVSGLKVGDHVVVEPYIVPEGTDTSETGHYNLSEGSNFIGLGGNGGGLAEKISVDERWVHKIPDNLPLDEAALIEPLSVGYHAVERANLSEKSTVLVVGAGPIGLLTAAVAKAQGHTVIISEPSGLRRKKAQEAQVADYFFNPIEDDIQAKVHEINEKGVDAAFECTSVQPGFDACLDAIRMGGTVVIVAIWGKPASVDMAKLVIKEANLLGTIAYNNTHPKTIDLVSTGKIKLDQFITAKIGLDDLIDKGFDTLIHHNETAVKILVSPTGKGL

SEQ ID NO: 11209 - protein, 344 aa, Mesorhizobium loti MAFF303099
MSNMMKALVKAKAEPGIWMEEVPVPEIGPNDVLIKIRKTAICGTDVHIYNWDQWAQKTVPVPMVTGHEFVGTVADFGAAVTEYKVGQRVSGEGHIVCGHCRNCRAGRGHLCRNTLGVGVNRPGAFGEYLAIPQHNVVPIPDDVPDEIAAIFDPLGNAVHTALSFDLVGEDVLVTGAGPIGIMGALVAQCVGARKVVITDINPVRLALAKKLGVQHVVDASKEKLRDVMPVLGMTEGFDVGLEMSGAAPAFRDMIDTMNNGGKIAILGIAPTGFEIDWNKVIFKMLHLKGIYGREMFETWYKMIALVQGPLDVSGLITHRIGIDDFQEGFDAMRSGSSGKVVMDW

SEQ ID NO: 11210 - protein, 346 aa, Escherichia coli CFT073
MKSVVNDTDGIVRVAESVIPEIKHQDEVRVKIASSGLCGSDLPRIFKNGAHYYPITLGHEFSGYIDAVGSGVDDLHPGDAVACVPLLPCFTCPECLKGFYSQCAKYDFIGSRRDGGFAEYIVVKRNNVFALPADMPIEDGAFIEPITVGLHAFHLAQGCENKNVIIIGAGTIGLLAIQCAVALGAKSVTAIDISSEKLALAKSFGAMQTFNSREMSAPQIQGVLRDLRFNQLILETAGVPQTVELAVEIAGPHAQLALVGTLHQDLHLTSATFGKILRKELTVIGSWMNYSSPWPGQEWETASRLLTERKLSLEPLIAHRGSFESFAQAVRDIARNAMPGKVLLIP

SEQ ID NO: 11211 - protein, 382 aa, Burkholderia cepacia R18194
MMRDAANFEPTDSRVTRPAFWNGLPERWTSDVEETLVCCHVRQETHDVKSFFFRSPQGRSFSFEPGQFLTLELDIDGETINRCYTISSSPARPHTVSITVKRVPGGKVSNWLHDNLQPGAPVRVLGPAGEFTCARHPARKYLFLSAGSGVTPLMSMSRAHHDLAEDRDILFVHSARTPDDIIFARELDLIASNHTNFRTSFVVERVGARTNWPGVTGFLTLPLLKLIAPDFMEREIFTCGPAPYMKAVRDLLDEAGFERKQYHEESFSFETLAQTASDELLADLAPPAEGADTDTKQYTVSFAKSNREISCGSEQHVLDAARQSGVRLPASCTQGMCGTCKVKLVSGQVEMKHNGGIRQREIDQGMVLLCCSKPLSDLVIDK

SEQ ID NO: 11212 - protein, 180 aa, Bacteroides thetaiotaomicron VPI-5482
MKSFILMVITMVCAISLEAQNKSFYDFNVTTIDGKEFPLSSLKGKKVLVVNVASKCGLTPQYAKLQELYDKYKDKNFVIIGFPANNFMGQEPGSNEEIAQFCSLKYDVTFPMMAKISVKGKNMSPLYQWLTEKKLNGKEDAPVQWNFQKFMIDENGNWVGFVAPKESPLSEKIVTWIEQE

SEQ ID NO: 11213 - protein, 318 aa, Ralstonia eutropha JMP134
MNQLEQLKQFTTVVADTGDFQLMKQYTPQDATTNPSLILKAVQKPEYRGLLEQAVRDYHNEGGVDAVMDGVLIAFGCEILAIVPGRVSTEVDARLSFDTEATVEKARHLIRLYEQRGVARERVLIKIASTWEGIRAAEILQREGIRCNMTLLFSLVQAVACAEAGAQLISPFVGRILDWYKKQAGDQWDAAANAGDNDPGVRSVRQIYDYYKKFGYNTEVMGASFRSTAQIVALAGSDLLTISPDLLEQLARTEGTVERKLSVDLAQAGNIARIPADEPAFRWQLNEDAMATEKLAEGIRLFAADAIKLEKLVAEIAG

SEQ ID NO: 11214 - protein, 318 aa, Psychrobacter sp. 273-4
MDKRVSIQWFPGHMNKARNEIKEIMPQMDVVIEVIDARIPYSSENPMVAALRGEKPVIKILNKADLADPELTQAWMDYLEQQNGVKAIACDTDKANDVKRIIAICKQLVPNKVGTGRQIKAMIMGIPNVGKSTLINTLAGRAVARTGDEPAVTKSQQLIKLDDDIMLYDTPGMLWPKVENENSGYRLAATGGIRDTAFDFADVASYTAEYLLTAYPELLKTRYKIEELPKTDWEFFEIAGRNRGCVRAGNKVDTYRMSEILVNELRSGKIGRITLEKPAMTEAEEVIVAEQRIASEEKRIAKEEEKRLRRLKTRKNRK

SEQ ID NO: 11215 - protein, 387 aa, Streptomyces coelicolor A3(2)
MEAPHRLRTGRRTPLITRSRLMSDFVPGLEGVVAFETEIAEPDKEGGALRYRGVDIEDLVGHVSFGNVWGLLVDGAFNPGLPPAEPFPIPVHSGDIRVDVQSALAMLAPAWGLKPLLDIDAAQARDDLARAAVMALSYVAQSARGQSLPMVPQREIDKAQSVVERFMIRWRGEPDPKHVAAVDAYWTSAAEHGMNASTFTARVIASTGADVAAALSGAVGAMSGPLHGGAPSRVLHMIEEIERTGDAEAYVKKTLDAGERLMGFGHRVYRAEDPRARVLRRTARELGAPRYEVAEALEKAALAELHARRPDRVLATNVEFWAAIMLDFAEVPAPMFTSMFTCARTAGWSAHILEQKRTGRLVRPSARYTGPGTRDPREIEGYADIAG

SEQ ID NO: 11216 - protein, 488 aa, Chloroflexus aurantiacus
MAMRYLIKNGTIIDPANRVATIGDILVANGKVERLYDLADLHTDREPLAPDVEVINARGCVVAPGFTDLHTHLRQPGEEHKETIASVSAAAAVGGFTTLCARPTTRPTPDHAAAIRQLRELADQYARVRIDLIGALTMGNEGQVLSEMRELAEAGCIAFSDGGRTIANTALLRHALAYAAALKLPVMVSCQDPYLAAGGVAHEGAVSIRLGLPAIPAAAEEAIVARDIALAEATGAHLHISRVSTAGSVALIRAARARGVHVTAEVTPHHLTLSDRWLLGWLEERNEIETGRPGAHPDLSLPSWLNPALLPPYDSSTRVDPPLRSIEHVEALVEGLRDGVIDAIATDHAPHALVDRDCEYGIAPPGISGLETALALTLTLVHRGEMDIVNLIAKLTEGPAQVLNRSPANLRPGATADIVIFDPERSWVVDPDHFASRGRNTPLRGQRLKGQVMLTMAAGKIIFRREDFGRQAQAAPQPSRLEGILGAE

SEQ ID NO: 11217 - protein, 88 aa, Glycine max
EGERHSSPLDCIPSTLFLTEVTYVDFLDRVHTSEVKLRSKGLWDVPHPWLNLFIPKTKIHHFAEVVFGNIVKETSNGPVLIYPVNKSK

SEQ ID NO: 11218 - protein, 214 aa, Neurospora crassa
MSDHEFGALSTPSSTEKCGDHSAKMDEYSGYRYAYASEPWIVSGSGVSPPPSSLLFDSFLFLSGYWDAVSSRDVVVEDNAKQLGEPKATFRLATVQKIVSEILPSSTGLSFAKEARDLLIDLCVEFISLVSSEANEISEKESKKTIACDHITQALERLGFADYVPAVLEAAAEHKEVQKGREKKANKFEQSGLSLEELERIQREQFADAAARHT

SEQ ID NO: 11219 - protein, 452 aa, Rubrivivax gelatinosus PM1
MGDSLNAALLQRDHRHLVHSLHNEAAHLAGNVWVKGEGTTLTDADGKRYVDAMSGLWNVTLGYGRRELVDAAAAQMGELAYASGYAGSTNLRAMELAEKLAADRVYPNMHRFFFTSGGGESTDSTIKTARYYWKAQGKPGKFKTLSVMGGYHGVTLAAMCATGMPAYWPSFEPRMPGFVHIPNHDAYRYTVPPGGDPATAAADELERAILAEGPDTVALFIAEPVMGGGAYVPPAGYFRRIREICDRYDVLFATDEVITGFGRTGKLFALGHWGSDVQPDLVQFAKGITSGYVPMGGVGLSDKVAAVFDRPGADTWMHCYTYSGHPVACAVALATLDVIEREGLLARAQVLGDRLLRGLRGALGGHPNVGDIRGLGLIAAVELVEDRFSKKSFDPARKMGPQVLAQVRQRGVITRGRGDTIYLGPALVSDEATIDRIVEAVAEGVGALLPAA

SEQ ID NO: 11220 - protein, 642 aa, Glycine max
MLLRPEGWLGLLAVMEPVVVGLGVGLVVLNEAGLGLLIDPLLVLIDDSDRVEIRGNGERGFEGDVGFFVVGFCNQQATTLLLLALHVERSDLIDIEAVEGLKDALDLDLRGRRNGLESDFVDVGEAVRHQKLYGEFLFAAAMCGILAVLGCVDNSQTKRARIIELSRRGPDWSGIHCYEDCYLAHQRLAIVDPTSGDQPLYNEDKTVIVTYEEHGEEFVNMLDGMFAFILLDTRDKSFIAARDAIGITPLYLGWGHDGGLRRWYNPPWFSEDIPSTPYDPTLLRETFERAVVKRMMTDVPFGVLLSGGLDSSLVAAVVNRYLAESESARQWGSQLHTFCIGLKGSPDLKAAKEVADYLGTRHHELYFTVQEGIDALEEVIYHIETYDVTTIRASTAMFLMSRKIKALGVKMVLSGEGSDEIFGGYLYFHKAPNKKEFHEETCRKIKALHLYDCLRANKSTAAWGVEARVPFLDKEFINVAMSIDPEWKMIRPDLGRIEKWVLRNAFDDDKNPYLPKHILYRQKEQFSDGVGYSWIDGLKDHANKQVTDATMMAANFIYPENTPTTKEGYLYRTIFEKFFPKNAAKATVPGGPSVACSTAKAVEWDAAWSKNLDPSGRAALGIHDAAYDAVDTKIDEPKNGTL

SEQ ID NO: 11221 - protein, 447 aa, Wolinella succinogenes
MKSLIWFRRDLRLEDNRTFEQASGEVLPLFIFDSHLLSPLPKEDRRVGYIYGEVMRLKSELRARGLDLAIFYGEPLKILSRLKEQGFSRLFASQDYDSYALSRDEAARELLDCRFVLDNYLFDPNEVLKKEGSPYTIFSAYYNQSLKILSEGHYAKGLDLPKKLAPYPIPAPPSLESMGFSPLPLLESLKILPQKRLEEFSSKITRYALDRDSLEAEATSGLSLFLRFGTLGVREVIRRLKVWQEEGIKVAPFYRQILWREFYAMLLYHFPHSEREDFKPMQMRWSESQERLERWQKGECGVPLVDAGMRELNHTGFMHNRARMVCASFLTKNLHLHWSWGERYFASKLLDYDVAQNAGNWQWCAGSGADAQPFFRIFNPYTQSLKFDPKGEYVKRWIPELRGISTQNWSSEERWEGLKERYLAPIVSAKRSAQEAKAMQNTLRVSS

SEQ ID NO: 11222 - protein, 189 aa, Cucumis sativus
MASSILSSAAVASVNSASPAQASMVAPFTGLKSSAGFPITRKNNVDITTLASNAGKVQCMKVWPPLGLRKFETLSYLPDMSNEQLSKECDYLLRNGWVPCVEFDIGSGFVYRENHRSPGFYDGRYWTMWKLPMFGCTDSSQVIQEIEEAKKEYPDAFIRVIGFDNVRQVQCISFIAYKPQVLLFLSSIC

SEQ ID NO: 11223 - protein, 451 aa, Zea mays
MAEHKGNVLLHKYEMGKLLGQGTFAKVYHARNTATSESVAIKVIDKEKVMKVGLIDQIQREISVMKLVRHPNIVQLYEVMATKTKIYFVLEHVKGGELFNKIQRGRLKEDAARKYFQQLICAVDFCHSRGVYHRDLKPENLLLDENSNLKVSDFGLSALAECHRQDGLLHTTCGTPAYVAPEVINRKGYDGAKADIWSCGVILFVLLAGYLPFHDKNLMDMYKKIEKADFKCPSWFSTDVRRLLQRILDPNPSRRISVKKIMENPWFRKGLGAKLLRYDLQNKNAPHVDKKADFDSLSTNVTTESKQHEEKKPTNMNAFDIISLSTGLDLSGLFEESNKKRESKFTSTNTSSTIISKIEDIAKNLRLNLTKKDGGLLKMEASKPGRKGVMGIDAEVFEVSPNFHLVEIKKTNGDTLEYQKVLNQEMRPALKEIVWAWQGEQSKQKQEQQSC

SEQ ID NO: 11224 - protein, 236 aa, Lotus corniculatus var. japonicus
MLCTRILFFSRTIRFAAPLSSSSLHSFVFSNSPITLSRSYHSSLLTTTSFPIKSLVSTSTTPFSFTLRPDHTMAAPTSVYDFTVKDARGNDVNLGDYKGKVLLIVNVASQCGLTNSNYTELSQLYEKYKSKGLEILGFPCNQFGAQEPGDNEQIQEFVCTRFKAEFPVFDKVDVNGDSAAPLYKYLKSSKGGLFGDKIKWNFSKFLVDKEGNVVERYAPTTSPLSIEKDLVKLLGA

SEQ ID NO: 11225 - protein, 1794 aa, Schizosaccharomyces pombe
MSYPNQMNGSMYGYGANNGVQPGFDSYGMPINQGGMNYQQQTYPYQQPYQPDGYAGNTMLPFQQSQPATQFNNGFGYASQPTGSVADYGQQQQQMYGYNGMMPQTMNNTGFMQPQQTGAIPGFAPQPTGFVQPQPTGFMSQQPASFMQPQRTGGAGFIQPQRTGAMPAYQPQMNNFMQPQKTGGFAPQATGFMQTQPFGAAPSFAPQPTGFVQPQQTGVVMPPQPTGYLQAQPTGPFASFVQPQQTASFMPAAQPLKPQKTGQIHNSKAMDTRLSFVSAADQAKFEQLFKSAVGREEAMSSEIGKAILVRSKLPTVQLSKIWRLSDTTRSGRLLFPQFVLAMYLCNLGLTGKPIPDKVPDGILNEVNAMVDAISFSLDENYAKPTQPIPQAAAQQMAAQMFGGFQQAAGIPSQITGFQPQAMMPQRTGMQPQMTGFQQPMIPQRTGMQPQMTGFQQPMMPQRTGLQPQMTGFQQPMVPQRTGMQPQMTGFQQPMMPQRTGLQPQMTGFQQPMVPQRTGMQPMMPGLQQPMAPQRTGMQPMMPQRTGMQPQMTGFQQPMAPQRTGMQPMMPQRTGMQPQMPGMQQPMAPQRTGMQPMMPQRTGMQQPMAPQRTGMQPMMPQRTGMQPQMPGMQQPMAPQRTGMQPMMPQRTGMQPQMPGMQQPMAPQRTGMQPMAPQRTGMQPMMPQRTGMQPQMPGMQQPMAPQRTGMQPMMPQRTGMQPQMPGMQQPMAPQRTGMQPMAPQRTGMQPQMTGGPMLPQRTGGMAPQPTGMPGQWGFINTPLSNLPGIEALGQQMMPNAPSGGLNNTFQQKKDIPWAISKEEKRIYDQIFDAWDKERKGTLGGNAVLEIFGQSKLTRTELEHIWNLCDHGDKGSLDRDEFAVALHLIYRKLNGNEVPAVLPPELIPPSTRNFTESLNQVKNLIKNDTSNRKPFGAENQSKLKKNSFYDNPSETTEKDATLYRHNDSDASAYVSSARRRDFKEEKIESAPPIINDIDSEIASLKKRIHEKSLVVNALEDKKLAATPANDVQNDSLIYRIKSVQDEINRLSTSNKSPEVASMNVRLEELSTRVSKMLSDINEVDHTIASLSLKLFQAEDTKNSYDQTSPEATQERNRTISSKLAEMEKQKNESKAALEQMKNYVTNIENNIRAKLLPSAANDDAWLSQNVVDESVTRVVKELPVPAPAAPQTLNPPSVSTVQQSKPIESNTHTPEVKATSESPSASSNLEDRAARIKAEAQRRMNERLAALGIKPRQKGTPSPAPVNSATSTPVAAPTAQQIQPGKQASAVSSNVPAVSASISTPPAVVPTVQHPQPTKQIPTAAVKDPSTTSTSFNTAPIPQQAPLENQFSKMSLEPPVRPAVPTSPKPQIPDSSNVHAPPPPVQPMNAMPSHNAVNARPSAPERRDSFGSVSSGSNVSSIEDETSTMPLKASQPTNPGAPSNHAPQVVPPAPMHAVAPVQPKAPGMVTNAPAPSSAPAPPAPVSQLPPAVPNVPVPSMIPSVAQQPPSSVAPATAPSSTLPPSQSSFAHVPSPAPPAPQHPSAAALSSAPADNSMPHRSSPYAPQEPVQKPQAINNIAPATNLGTSQSFSPRMGPVNNSGSPLAMNAAGQPSLAVPAVPSAPSNHFNPFAKMQPPAPSPLQPSGHDSDNWSQHGDEEEEDSEDDIRSSKDAAALAAKLFGGMAPAHPVSTPPVRPQSAAPPQMSAPTPPPPPMSVPPPPSAPPMPAGPPSAPPPPLPASSAPSVPNPGDRSALLQQIHTGTRLKKTVTTDKSKPIAGRVLDASDGNSSAWYGNLS

SEQ ID NO: 11226 - protein, 479 aa, Sphingomonas sp. tfd44
MTYPDTRLFIGGRWQDAADGRSLAVQNPATGLEIGRVAHCGRADLDRALDAAQRGFEIWRDLTPAERSKIMRRAAGLMRERADEIARLLTQEQGKPLHEAKIEAMAAGDIIEWFAEEGFRLYGRLVPHRTDIAIRQMVIKDAVGPVAAFTPWNFPINQVVRKISAALAAGCSMIVKAPEETPASPAELIRAFQDAGLPDGVLNLVFGDPAEISNYLISSPIIRKITFTGSTPVGKLLASLAGKHMKRVSMELGGHAPAIVCEDADIGLAVKSLSASKFRNAGQVCIAPTRFLVHSSIKHAFADALAAAARDLRVGDGFADGTQIGPLANSRRLAAMAEFQQDAIEKGATLLTGGNRVGDVGNFWAPTVLSDVPLEARLFNDEPFGPVAGIRSFDRLEEAILEANRLSFGLAGYAFTKSLATADILARRVEVGMLWVNSPATPTAELPFGGIKDSGYGTEGGPEALDNYINPRAVVVANV

SEQ ID NO: 11227 - protein, 74 aa, Glycine max
MADIDRSFDNNVSAVSTEKSSQVSDVEFSEAEEILIAMVYNLVGERWSLIAGRIPGRTAEEIEKYWTSRFSTSQ

SEQ ID NO: 11228 - protein, 70 aa, Glycine max
AAHTHTYKIEKILFHGKSQYRELLVFETSRQGKGAILDGHIQLTEKDEFAYKETRTHLALWSHTKKKKVL

SEQ ID NO: 11229 - protein, 158 aa, Glycine max
  misc_feature (114)..(114): Xaa can be any naturally occurring amino acid
  misc_feature (145)..(145): Xaa can be any naturally occurring amino acid
ALSMIASITDTTVNLAGAGLDATSTGLKPMVGCPTMKTNNDITYIANNGGRAQCMQVWTPFGSKKYETLSYLPDLDEAQSAKEVEYLIKKGWITCLEYKLDHSFLYRELKMPPXYFEGLSWSLWKVPMFGSTDTSHVLNELQYAXTAYPDSQIRIIGF

SEQ ID NO: 11230 - protein, 512 aa, Salmonella typhimurium LT2
MTNNPPSTRIQPGEYGYPLKLKARYDNFIGGDWVAPADGEYYQNLTPVTGQPLCEVASSGKKDIDLALDAAHKAKDKWAHTSVQDRAAILFKIADRMEQNLELLATAETWDNGKPIRETSAADVPLAIDHFRYFASCIRAQEGGISEVDSETVAYHFHEPLGVVGQIIPWNFPLLMASWKMAPALAAGNCVVLKPARLTPLSVLLLMEIIGDLLPPGVVNVVNGAGGEIGEYLATSKRIAKVAFTGSTEVGQQIMQYATQNIIPVTLELGGKSPNIFFADVMDEEDAFFDKALEGFALFAFNQGEVCTCPSRALVQESIYERFMERAIRRVESIRSGNPLDSGTQMGAQVSHGQLETILNYIDIGKKEGADILTGGRRKELDGELKEGYYLEPTILFGKNNMRVFQEEIFGPVLAVTTFKTMEEALEIANDTQYGLGAGVWSRNGNLAYKMGRGIQAGRVWTNCYHAYPAHAAFGGYKQSGIGRETHKMMLEHYQQTKCLLVSYSDKPLGLF

SEQ ID NO: 11231 - protein, 187 aa, Brassica napus
MSGSLSCSAADLAVLLGPNATAAADYICGQLSTVNNKFTDVAFAVDNTYLLFSAYLVFSMQLGFAMLCAGSVRAKNTMNIMLTNVLDAAAGGLFYYLFGYAFAFGSPSNGFIGKHNFGLKDFPSASADYSNFLYQWAFAIAAAGITSGSIAERTQFVAYLIYSSFLTGFVYPVVSHWFWSVDGWASP

SEQ ID NO: 11232 - protein, 276 aa, Ralstonia solanacearum
MTDTQPAVTLGDGARMPQLGLGLWRTPAGETAGLVRTAIEAGYRLVDTAAAYGNERGVGEGVRAAGAEPAVFVTTKLWNEDQGYDRTLRAFDESLRCLGLPAIDLYLIHWPAPSRGRYVESWRALIRLRDEGRARSIGVSNFGAEHLARIIDETGEAPAVNQIELHPWFQQRALRAFHARHGVRTESWSPLGQGGLLHDLTVREIAARHGKTPAQVVIRWHLDNGLIVIPKSAHPDRIRENIAVFDFCLTPADQAAIAGLDRADGRIGPDPVAAGF

SEQ ID NO: 11233 - protein, 115 aa, Arabidopsis thaliana
  misc_feature (89)..(89): Xaa can be any naturally occurring amino acid
MAFALRFFTCLVLTVCIVASVDAAISCGTVAGSLAPCATYLSKGGLVPPSCCAGVKTLNSMAKTTPDRQQACRCIQSTAKSISGLNPSXASGLPGKCGVSIPYPISMSTNCNNIK

SEQ ID NO: 11234 - protein, 460 aa, Zea mays
MVNGERRADAECTRASLLGRYEIGRTLGEGNFGKVKYARHIATGGHFAIKILDRSKILSLRIDDQIRREIGTLKLLKHPNVVRLHEVAASKTKIYMVLEFVNGGELFDKIAIKGKLSEHEGRRLFQQLIDGVSYCHDRGVYHRDLKPENVLVDRKGTIKISDFGLSALPQHLGSDGLLHTTCGSPNYIAPEVLQNRGYDGSLSDLWSCGVILYVMLVGCLPFDDRNLVVLYQKIFKGDCQIPKWLSPAAQDLLKRILQPNPMKRINVAGIREHEWFKKDYVPAVPHDDDEDVLPSPAPSIKPIDEPAQEKCSPINAFQLIGMASSLDLSGFFEEEDAAQRKIRFTSTHPPKDLFDKIESVVMEMGFKVHRGAGKLKVLKNSKCSRNPSSLLVCTEVFELGPSLYVVELRKSHGDSTLYRQLCERLSDELGACKTDQIARTESSSDDLSSVDGEAFPLSGF

SEQ ID NO: 11235 - protein, 321 aa, Malus x domestica
ILPFKLPAIGPNDVRIRIKAVGICGSDVHYLKTMKCADFEVKEPMVIGHECAGIVDKVGSEVKHLVPGDRVAVEPGISCARCQQCKGGRYNLCPDMKFFATPPVHGSLANQIVHPADLCFKLPKNVSLEEGAMCEPLSIGVHACRRANVGPETTVLITGAGPIGLVSVLAARAFGAPRIVIVDMDDKRLAMAKSLGADETVKVSTKMEDLDDEVAEIKKAMESEVDVTFDCVGFNKTMSTGLNATRPGGKVCLVGMGHGMMTVPLTPAAAREVDVVGVFRYKNTWPLCLEFLRSGKIDVKPLITHRFGFTEKEVEEASLEF

SEQ ID NO: 11236 - protein, 205 aa, Zea mays
  misc_feature (105)..(105): Xaa can be any naturally occurring amino acid
MAASSTATSVHDFIVKDASGKDVDLSTYKGKVLLIVNVASQCGLTNSNYTELAQLYEKYKDQGFEILAFPCNQFGGQEPGTNEEIVQFACTRFKAEYPIFDKVLXDVNGSNAAPIYKFLKSSKGGLFGDSIKWNFSKFLVDKEGRVVDRYASILPGSPCHQISPRMNSFPSSWLTRRDRVVDRYAPTTSPLSIEVNFQRCSSHLL

SEQ ID NO: 11237 - protein, 201 aa, Shigella flexneri 2a str. 301
MALHDENVVWHSHPVTVQQRELHHGHRGVVLWFTGLSGSGKSTVAGALEEALHKLSVSTYLLDGDNVRHGLCSDLGFSDADRKENIRRVGEVANLMVEAGLVVLTAFISPHRAERQMVRERVGEGRFIEVFVDTPLAICEARDPKGLYKKARAGELRNFTGIDSVYEAPESAEIHLNGEQLVTNLVQQLLDLLRQNDIIRS

SEQ ID NO: 11238 - protein, 192 aa, Penicillium marneffei
MVVATIKCVVVGDGAVGKTCLLISYTTNKFPSEYVPTVFDNYAVTVMIGDEPYTLGLFDTAGQEDYDRLRPLSYPQTDVFLVCFSVTSPASFENVREKWFPEVHHHCPGVPCLIVGTQTDLRDDPAVREKLAKQKMQPVRKEDGDRMAKELGAVKYVECSALTQYKLKDVFDEAIVAALEPAPKKRPKCVVL

SEQ ID NO: 11239 - protein, 54 aa, Zea mays
MGSETFVEILLAILLPPVGVFLRYGIGVEFWICLLLTILGYIPGIIYAVYVLVA

SEQ ID NO: 11240 - protein, 223 aa, Triticum aestivum
  misc_feature (112)..(112): Xaa can be any naturally occurring amino acid
LTSFEAGCSTSTSTQSPSPRLPAHRHHPSMAAAAKRGGTGSRGLLMGRYELGRVLGKGTFAKVYHARHLQTGESVAIKVLDREKAVRSGLVSHIKREIAVLRRVRHPNIVHXLFEVMATKTKIYFVMELVRGGELFSRVSKGRLKEDIARRYFQHLISAVGFCHTRGVFHRDLKPENLLVDEAGNLKVSDFGLSAVAEPFQPEGLLHTFCGTPAYVAPRCPRP

SEQ ID NO: 11241 - protein, 378 aa, Nostoc sp. PCC 7120
MMVCEYKPGLEGIPAAQSSISYVDGQKGILEYRGIRIEDLAQQSTFLETAYLLIWGELPTKEELQVFEEEVRLHRRIKYRIRDMMKCFPESGHPMDALQASAAALGLFYSRRDLHNRCYIRDAVVRLIATIPTMVAAFQLMRKGNDPVKPRDDLDYSANFLYMLNEKEPDALAAKIFDICLILHVEHTMNASTFSARVTASTLTDPYAVVASAVGTLGGPLHGGANEEVIQMLEEIGSVENVRSYVEERLQRKDKLMGFGHRVYKVKDPRATILQGLAEQLFAKFGADKYYDIAQEMERVVEEKLGHKGIYPNVDFYSGLVYRKMGIPTDLFTPIFAIARVAGWLAHWKEQLEENRIFRPTQVYNGKHSVTYTPIDQR

SEQ ID NO: 11242 - protein, 449 aa, Zea mays
MSASVGRTRVGRYELGRTLGEGTFAKVKFARNVETGENVAIKILDKEKVLKHKMIAQIKREISTMKLIRHPNVIRMYEVMASKTKIYIVMELVTGGELFDKIASRGRLKEDDARKYFQQLINAVDYCHSRGVYHRDLKPENLLLDASGTLKVSDFGLSALSQQVREDGLLHTTCGTPNYVAPEVINNKGYDGAKADLWSCGVILFVLMAGYLPFEDSNLMSLYKKIFKADFSCPSWFSTSAKKLIKKILEPNANNRITIAELINNEWFKKGYQPPRFETADVNLDDVNSIFDESGEPAQLVVERREERPSVMNAFELISTSQGLNLGTLFEKQTGSVKRETRFASRLPANEILSKIEAAAGPMGFNVQKRNYKLKLQGENPGRKGQLAIATEVFEVTPSLYMVELRKSNGDTLEFHKFYHNISNGLKDVMWKPESGIVEGDEARQRRSP

SEQ ID NO: 11243 - protein, 320 aa, Arabidopsis thaliana
MWVVIAVSHCLRELEVIYSSYPEKPNILPSNLYTCKSLVILELCGEIRLDVPRMAFLPSLKTLQLHSVRYLNEDSLHRLLSNCPVLEDLLVDLLLSDSMEKLTVVVPSLQILSLFIPHSYEIDGIVIETPSLKYFKLIDHNSKSHYCLVKNMPNLIEADIDVELHSIKSLIGSITSVKRLSICSQAMYDGGFVFNQLKHLKLCRCKGHSSDLLVRLLKDSSNLQALDLSEMDYHENHDILYWHQPSTVPECMLLSLQTLNLSAYRGTPEERDLAVYFLKNAVHLKTTTIKSCVFDDERFDMLKELALSSRASTTCQLVFD

SEQ ID NO: 11244 - protein, 143 aa, Triticum aestivum
  misc_feature (99)..(99): Xaa can be any naturally occurring amino acid
  misc_feature (111)..(111): Xaa can be any naturally occurring amino acid
MAPAVMASSATTVAPFQGLKSTAGLPVSRRSGSAGLSSVSNGGRIRCMQVWPIEGIKKFETLSYLPPLSTEALLKQVDYLIRSKWVPCLEFSKVGFVFXVSNNSSPGYYDXRYWTIVESCLCSGWNRTQTARLKRLEGRSKGP

SEQ ID NO: 11245 - protein, 168 aa, Arabidopsis thaliana
MEGVGSRLSRTSSRYSGPAATAVFSGRVRKWKKKWVRVSTSSVGVFRASKSNGRNNSNNSNSPHHLLLHKWTPLTSATVTASDANGSGETEESPKRRFRYAPIAMLEHREKVISKDSEIEETEEFDTESPLPKAVELDMNLTDSDQTKEAKTGNLNLGLCLNSEGTEE

SEQ ID NO: 11246 - protein, 338 aa, Methanosarcina barkeri str. fusaro
MRLAVIEGDGIGREIIPAAVKVLDAFGLEFEKVPLELGYTRWERTGTAISNNDLETIKGCDAVLFGAITTVPDPNYKSVLLTIRKELDLYANVRPVKPLPGITGVTGRNDFDFIIVRENTEGLYSGIEEIGPELSWTKRVVTRKGSERIAEYACKLAKKRKNKLTIVHKSNVLKSDKLFLDVCRQTASANGVEYEDMLVDSMAYNLIMRPERYDIVVTTNLFGDILSDMCAALVGSLGLVPSANIGEKYAFFEPVHGSAPDIAGKGIANPLAAILCVKMLLEWMGEPRSQIIDEAIAYVLQKKIITPDLGGTASTMEVGNAVAEYVLSNIQDRRSPPW

SEQ ID NO: 11247 - protein, 365 aa, Apium graveolens
MAKSSEIEHPVKAFGWAARDTTGLLSPFKFSRRATGEKDVRLKVLFSGVCHSDHHMIHNNWGFTTYPIVPGHEIVGVVTEVGSKVEKVKVGDNVGIGCLVGSCRSCESCCDNRESHCENIIDTYGSIYFDGTMTHGGYSDTMVADEHFILRWPKNLPLDSGAPLLCAGITTYSPLKYYGLDKPGTKIGVVGLGGLGHVAVKMAKAFGAQVTVIDISESKRKEALEKLGADSFLLNSDQEQMKGARSSLDGIIDTVPVNHPLAPLFDLLKPNGKLVMVGAPEKPFELPVFSLLKGRKLLGGTINGGIKETQEMLDFAAKHNITADVEVIPMDYVNTAMERLVKSDVRYRFVIDIANTMRTEESLGA

SEQ ID NO: 11248 - protein, 337 aa, Streptococcus pyogenes M1 GAS
MKRIAVLTSGGDAPGMNAAIRAVVRKAISEGMEVYGINRGYAGMVDGDIFPLGSKEVGDKISRGGTFLYSARYPEFAQLEGQLAGIEQLKKHGIEGVVVIGGDGSYHGAMRLTEHGFPAVGIPGTIDNDIAGTDYTIGFDTAVNTAVEAIDKLRDTSSSHGRTFVVEVMGRNAGDIALWAGIASGADQIIVPEEEFDIEKVASTIQYDFEHKGKNHHIIVLAEGVMSGEAFAQKLKEAGDKSDLRVTNLGHILRGGSPTARDRVIASWMGSHAVELLKDGKGGLAVGIHNEELVESPILGTAEEGALFSLTEEGKIIVNNPHKARLDFAALNRSLSQ

SEQ ID NO: 11249 - protein, 172 aa, Cucumis melo
MDTKIGSLDTCKPQNNVVCCPSNGSVCTIQNSVVPSTVVNSSDATLGRHLARRLVQIGVTDVFTVPGDFNLTLLDHLIAEPALNNIGCCNELNAGYAADGYARSRGVGACVVTFTVGGLSVLNAIAGAYSENLPLICIVGGPNSTIMELTESFIYNGLPDLSQNSKVLKRYL

SEQ ID NO: 11250 - protein, 182 aa, Triticum aestivum
  misc_feature (114)..(114): Xaa can be any naturally occurring amino acid
  misc_feature (136)..(136): Xaa can be any naturally occurring amino acid
  misc_feature (142)..(142): Xaa can be any naturally occurring amino acid
  misc_feature (146)..(146): Xaa can be any naturally occurring amino acid
  misc_feature (156)..(156): Xaa can be any naturally occurring amino acid
  misc_feature (161)..(161): Xaa can be any naturally occurring amino acid
MAPTVMASSATSVAPFQGLKSTAGLPVSRRSNGASLGSVSNGGRIRCMQVWPIEGIKKFETLSYLPPLSTEALLKQVDYLIRSKWVPCLEFSKVGFIFREHNASPGYYDGRYWXTMWKLPMFGCTDATQVINEVEXVKKEYXDAYXRIIGFTTSQXQCVSXSPSNGLQESGQTATHTGIYKC

SEQ ID NO: 11251 - protein, 429 aa, Zea mays
MAKSKSSAKAGPPLLGKYELGHLLGRGNFAKVYHARCLGGGDPVAVKVLDKAGLAATGMASRLLREVSAMRRLSHPNVLRLHEVLATRSKVYLVMELAPGGDLLSRLASLPSRRLPEHAARRVFLQLASALIYSHARGVFHRDVKPQNVLLDAEGNLKVSDFGLAALPDSVRDDGRLHTACGTPAFAAPEVLRRRAYDGAKADAWSCGVILFVLLAGHLPFDDANIADMCRRAHRREYTVPRWVSQPARRLVARLLDPNPATRLAVAELAGHPWFKRSLSVDSQLGGLLDGQAERELAFQAPPALNAFDIISMSPGLDLSGLFGEGRRRREKRFMTTASPERAVERLAQAGARLGYFIVGKKGAERLPLGVLPGLVAMSMEMSEVSPELMLVELRLEGGHGDEDEAFGWEELRVELGDVVTAWHVSEEG

SEQ ID NO: 11252 - protein, 357 aa, Rubrobacter xylanophilus DSM 9941
MPEKKMMRAAVYRGPRELRVEPVPVPEIGPSDVLVRVHSCGICGSDLHSYKAGMYIRPGQIMGHEFMGTVAAAGEDVEGVEEGDRVTGFSIGVCGSCYWCSRQQYILCPELFRNSTGYGLPGGFAEYVPIRNAVVGQSIHPVPSELDDETAATTEPVSVGVGAIEAAGVRPGDRVVVLGAGMIGNACMQAARAAGAGQVAVIDVSPVRLEAARSLGADAVFDARTGDALSWVKELWGVGRYHFNEGGMADVVVEAAGAPVTVQQAFEMVRSGGAIVFVGLPEEPAPIDVTKIVHKQPRIVGSLGGDFARAIELMASGSIRTKELITHRFPLEDAAEAFETQLRTGEAMKVMIQPREG

SEQ ID NO: 11253 - protein, 501 aa, Novosphingobium aromaticivorans
MATQLRSAENEYGIKSEYGHYIGGEWIAGDSGKTIDLLNPSTGKVLTKIQAGNAKDIERAIAAAKAAFPKWSQSLPGERQEILIEVARRLKARHSHYATLETLNNGKPMRESMYFDMPQTIGQFELFAGAAYGLHGQTLDYPDAIGIVHREPLGVCAQIIPWNVPMLMMACKIAPALASGNTVVLKPAETVCLSVIEFFVEMADLLPPGVINVVTGYGADVGEALVTSPDVAKVAFTGSIATARRIIQYASANIIPQTLELGGKSAHIVCGDADIDAAVESATMSTVLNKGEVCLAGSRLFLHQSIQDEFLAKFKTALEGIRQGDPLDMATQLGAQASKMQFDKVQSYLRLATEEGAEVLTGGSRSDAADLADGNFIKPTVFTNVNNSMRIAQEEIFGPVTSVITWSDEDDMMKQANNTTYGLAGGVWTKDIARAHRIARKLETGTVWINRYYNLKANMPLGGYKQSGFGREFSHEVLNHYTQTKSVVVNLQEGRTGMFDQ

SEQ ID NO: 11254 - protein, 387 aa, Rickettsia sp. Rf31
SNNNDSEFAELKIRGKIFKLPILKASIGEDVIDISRVSSEADCFTYDPGFMSTASCQSTITYINGDKGILRHRGYDIKDLAEKSDFLEVAYLLIYGELPSIEQYNNFTKQVAHHSLVNERLHYLFQTFCSSSHPMAIMLAAVGSLSAFYPDLLNFKEADYELTAIRMIAKIPTIAAMSYKYSIGQPFIYPDNSLDFTENFLHMMFATPCTKYKVNPIIKNALNKIFILHADHEQNASTSTVRIAGSSGANPFACVSTGIASLWGPAHGGANEAVINMLKEIGSSKNIPKYIAKAKDKNDPFRLMGFGHRVYKNYDPRAVVLKETCKEVLKELGQLENNPLLQIAIELEAIALKDEYFIERKLYPNVDFYSGVIYKAMGIPSQMFTVL

SEQ ID NO: 11255 - protein, 280 aa, Glycine max
  misc_feature (204)..(204): Xaa can be any naturally occurring amino acid
MGVFSENPNPDPVVIRQVWASNLESEFQLIRELIDHYPFISMDTEFPGVVFRPHLDPTKPYNHRNNNRNRHSDHYRLLKSNVDALNLIQVGLTLTDAAGNLPDLAGNRSIWEFNFRDFDVARDAYALDSIDLLRRQGIDFARNATDGVESTRFAELMMSSGLVCNDSVSWVTFHSAYDFGYLVKILTRRNLPTRLEEFLKTVKXFFGDNVYDVKPMMRFCDTLYGGLDRVARSLNVDRAVGKCHQAGSDSLLTWHAFQKIVDIYFVKEEHRKHAGVLFGL

SEQ ID NO: 11256 - protein, 108 aa, Triticum aestivum
MNRDRWDGNTSAVFPEEEEVFYTVGILRSAVSEGDLGRLEEQNEEILRFCEEAGIPCVQYLPYYAGQAGWEKKHFGPAKWARFVERKRKYDPKAILSRGQRIFTSPLA

SEQ ID NO: 11257 - protein, 113 aa, Rickettsia cooleyi
ANEAVINMLKEIGSSENIPKYIAKAKDKNDPFRLMGFGHRVYKSYDPRAAVLKETCKEVLKELGQLENNPLLQIAIELEAIALKDEYFIERKLYPNVDFYSGIIYKAMGIPSQ

SEQ ID NO: 11258 - protein, 389 aa, Rickettsia sp. RF2125
TNGNNNDSEFAELKIRGKIFKLPILKASIGEDVIDISRVSSEADCFTYDPGFMSTASCQSTITYIDGDKGILRHRGYDIKDLAEKSDFLEVAYLLIYGELPSIEQYNNFTKQVAHHSLVNERLHYLFQTFCSSSHPMAIMLAAVGSLSAFYPDLLNFKEADYELTAIRMIAKIPTIAAMSYKYSIGQPFIYPDNSLDFTENFLHMMFATPCTKYKVNPIIKNALNKIFILHADHEQNASTSTVRIAGSSGANPFACVSTGIASLWGPAHGGANEAVINMLKEIGSSENIPKYIAKAKDKNDPFRLMGFGHRVYKNYDPRAAVLKETCKEVLKELGQLENNPLLQIAIELEAIALKDEYFIERKLYPNVDFYSGIIYKAMGIPSQMFTVL

SEQ ID NO: 11259 - protein, 362 aa, Populus tremula x Populus tremuloides
MSKSPEEEHPVKAFGWAARDQSGHLSPFNFSRRATGEEDVRFKVLYCGICHSDLHSIKNDWGFSMYPLVPGHEIVGEVTEVGSKVKKVNVGDKVGVGCLVGACHSCESCANDLENYCPKMILTYSSIYHDGTITYGGYSDHMVANERYIIRFPDNMPLDGGAPLLCAGITVYSPLKYFGLDEPGKHIGIVGLGGLGHVAVKFAKAFGSKVTVISTSPSKKEEALKNLGADSFLVSRDQEQMQAAAGTLDGIIDTVSAVHPLLPLFGLLKSHGKLILVGAPEKPLELPAFSLIAGRKIVAGSGIGGMKETQEMIDFAAKHNITADIEVISTDYLNTAMERLAKNDVRYRFVIDVGNTLAATKP

SEQ ID NO: 11260 - protein, 347 aa, Escherichia coli CFT073
MELVRSKVMKSILIEKPNQLSIIEREIPTPSAGEVRVKVKLAGICGSDSHIYRGHNPFAKYPRVIGHEFFGVIDAVGEGVESARVGERVAVDPVVSCGHCYPCSIGKPNVCTTLAVLGVHADGGFSEYAVVPAKNAWKIPEAVADQYAVMIEPFTIAANVTGHGQPTENDTVLVYGAGPIGLTIVQVLKGVYNVKNVIVADRIDERLEKAKESGADWAINNSQTPLGESFAEKGIKPTLIIDAACHPSILKEAVTLASPAARIVLMGFSSEPSEVIQQGITGKELSIFSSRLNANKFPVVIDWLSKGLIKPEKLITHTFDFQHVADAISLFELDQKHCCKVLLTFSE

SEQ ID NO: 11261 - protein, 140 aa, Brassica napus
  misc_feature (11)..(12): Xaa can be any naturally occurring amino acid
  misc_feature (28)..(28): Xaa can be any naturally occurring amino acid
  misc_feature (32)..(32): Xaa can be any naturally occurring amino acid
  misc_feature (35)..(35): Xaa can be any naturally occurring amino acid
  misc_feature (39)..(39): Xaa can be any naturally occurring amino acid
  misc_feature (46)..(47): Xaa can be any naturally occurring amino acid
  misc_feature (52)..(52): Xaa can be any naturally occurring amino acid
  misc_feature (54)..(54): Xaa can be any naturally occurring amino acid
  misc_feature (58)..(60): Xaa can be any naturally occurring amino acid
  misc_feature (64)..(64): Xaa can be any naturally occurring amino acid
  misc_feature (72)..(72): Xaa can be any naturally occurring amino acid
  misc_feature (75)..(75): Xaa can be any naturally occurring amino acid
  misc_feature (78)..(78): Xaa can be any naturally occurring amino acid
  misc_feature (81)..(82): Xaa can be any naturally occurring amino acid
  misc_feature (85)..(85): Xaa can be any naturally occurring amino acid
  misc_feature (87)..(87): Xaa can be any naturally occurring amino acid
  misc_feature (90)..(91): Xaa can be any naturally occurring amino acid
  misc_feature (93)..(93): Xaa can be any naturally occurring amino acid
  misc_feature (97)..(98): Xaa can be any naturally occurring amino acid
  misc_feature (102)..(102): Xaa can be any naturally occurring amino acid
  misc_feature (105)..(105): Xaa can be any naturally occurring amino acid
  misc_feature (107)..(109): Xaa can be any naturally occurring amino acid
  misc_feature (111)..(111): Xaa can be any naturally occurring amino acid
  misc_feature (113)..(113): Xaa can be any naturally occurring amino acid
MASSMLSSAAXXTSPAQGTMVAPFTGLXSSAXFPXTRKXNNDITFXXSNGRXVXCMKXXXPVGXKKIENLSXLSXLTXMNXXKGXDXPFXXKXVSCXXIQMXHGXFXXXGXGXTPPILIGVLKGNFLGRADGGQKGKTKF

SEQ ID NO: 11262 - protein, 282 aa, Glycine max
MESKPHVLMHRYELGRLLGQGTFGKVYYARSTITNHSVAIKVIDKDKVMKTGQAEQIKREISVMRLARHPNIIQLFEVLANKNKIYFVIECAKGGELFNKVAKGKLKEDVAHKYFKQLINAVDYCHSRGVYHRDIKPENILLDENGNLKVSDFGLSALVDSKRQDGLLHTPCGTPAYVAPEVIKRKGYDGTKADIWSCGIVLFVLLAGYLPFHDPNLIEMYRKISKAELKCPNWFPPEVCELLGMMLNPNPETRIPISTIRENSWFKKGQNIKNKRPVENNT

SEQ ID NO: 11263 - protein, 181 aa, Acinetobacter sp. ADP1
MSQSIYHIPVQTISGQDTSLDTYRGKVLLIVNVASKCGLTPQYEGLEKLYQDKQQQGLEILGFPANNFLEQEPGSNDEIQQFCSLTYDVHFPLFGKISVAGEDKHPLYQTLIEAQPERIGEGPWWKDLVDYGLTPNPKPEVLWNFEKFLINKNGEVVARFAPDITADDPRLVDAINAELAK

SEQ ID NO: 11264 - protein, 442 aa, Mycobacterium avium subsp. paratuberculosis str. k10
MPALLWFRRDLRLHDHPALSAAADSDEVLACFVLDPRLQRSSGPRRLQFLGDSLRVLRDELDGRLLVTRGRPDIRIPEIAKAIGASSVHVSEDFTPFGKRRDARVRAALASVPLVATGSPYLVAPGRVTKPDGSPYQVFTPFLRRWRDTGWRPPVKTGAASARWLDPARLGITDCEIPDPGATLDLAAGEEAARNKWKSFVDNGLANYADDRHRPDIEGTSRMSAHLKFGTIHPRTLVADLDLRAAAARAYLRELAFRDFYADVLHHRPASAWRNWNSAFDAIRTDTGAEAGRRFAAWKAGETGFPFVDAGMRQLRQTGFMHNRVRMTVASFLVKDLHLPWQWGAHWFLQQLVDGDLANNQHGWQWCAGCGTDAAPYFRVFNPAAQGEKFDPSGDYIRRWVPELRCADDPHLRTGERPPGYPAPIVDHATERAEALRRYRSM

SEQ ID NO: 11265 - protein, 135 aa, Brassica napus
MGGGGRVMATAAKVAGIGVAKGGFRGGLGVPAAANDQFNVRSTSAAKPVSASLSSAIHPSAEADAMVLQRASWEDDWEFAEVETTTIPRVVFSKPPSLQEAKEATDDLKDAINLVYTEGSYEAGSVSRMLSSFHL

SEQ ID NO: 11266 - protein, 326 aa, Glycine max
  misc_feature (303)..(303): Xaa can be any naturally occurring amino acid
MEQSVLDDIINRLLEVRTRPGKQVQLSESEIRQLCVVSREIFLQQPNLLELEAPIKICGDVHGQYSDLLRLFEYGGLPPEANYLFLGDYVDRGKQSLETICLLLAYKIKYPENFFLLRGNHECASINRIYGFYDECKRRFNVRLWKTFTDCFNCLPVAARVDEKILCMHGGLSPDLNNLDQIRNLQRPTDVPDTGLLCDLLWSDPSRDVQGWGMNDRGVSFTFGADKVSEFLQKHDLDLICRAHQVVEDGYEFFANRQLVTIFSAPNYCGEFDNAGAMMSVDETLMCSFQILKPADKKAKLHXGSTTTAKPGNSPAGVKCFLGAKV

SEQ ID NO: 11267 - protein, 157 aa, Lactococcus lactis subsp. lactis Il1403
MNFYDFSAFKMNGETVSMSDFKGKVVIVVNTASKCGFTPQFEGLEKLYENYKDQGLEILGFPCNQFVNQDAGENSEINEFCQLNYGVTFPMFQKIKVNGKEAHPLYQFLKKEAKGALSGTIKWNFTKFLIDREGNVIERFAPKTEPKEMEEEIQKLL

SEQ ID NO: 11268 - protein, 183 aa, Pyrus pyrifolia
MASSMISSGTVATVSADRPAPAQARMVAPFNGLKSSSAFPVTRKSNDITSIASNGGRVQCMQVWPPLGLKKFETLSYLPPLSSESLAKEVDYLLRKNWVPCLEFELETGFVYRENHRSPGYYDGRYWTMWKLPMFGCTDSSQVLKELEEAKKAYPQSFIRIIGFDNVRQVQCISFIAYKPAGF

SEQ ID NO: 11269 - protein, 501 aa, Burkholderia cepacia R18194
METNEHFPLLDATRAFLAKPKKMLIGAEWSDAASGRQLDVVNPADGTVLARVPEADAHDVQQAVAAARRAFDAGPWRTAKTTDRERLLLTLADLIEANARELAEIESLDNGKPVMVAQGLDVAMAAQCFRYMAGWATKIEGSVIDAGMPYMPDSEIFTYTRKEPVGVVGAIIPWNFPLLMAAWKLAPALATGCTVVLKPAEDTPLSALRLGELIREAGFPDGVVNIVTGYGHTAGAALSSDPRIDKIAFTGSTQTGKTIGHAALDNMTRMSLELGGKSPVIVLPDVDPDKAALGVANAIFFNQGQVCTAGSRAYIHAKVFDDVIERVAKIAASLKIGPGMDPSTQIGPLVSAKQRQRVCGYIDSGFGEGARAAAGGRAVDGPGFFVEPTVLVDTTQAMRVVREEIFGPVLVAMPFDDVDTAVQLANDTPYGLGASIWSNDLSAIHKLIPRIAAGTVWVNCHSLLDNAMPFGGMKQSGFGRELGRAVIDQYTESKSVMMNYA

SEQ ID NO: 11270 - protein, 315 aa, Mesoplasma florum L1
MSAEFNWFPGHMNKTLKNIEEKIPVVDLVIEILDARAPYSSRNLTFSKILKNKPILYVLSKADIADPNITKEWVEFYEKKNNTVMVLDDKQKNIVKPLIDLINKATKEKQEKDKAKGMVNSLINVLVIGIPNVGKSTFINRLIKNKSVKAGNKPGLTRGIQLIHLSQFISLLDTPGVLPAKLENETVATNICAINSIKEDVYPKERVAGKLMQYLFNHYEGLIENHYKISPRLQRPIQITDTFIIFEMIAKVRKWYMNDDLLDYDRVIDAFMRDIIANEFNKVSFERILEVVPEEMEKASKIKNEKAIEDISDLW

SEQ ID NO: 11271 - protein, 429 aa, Methylococcus capsulatus str. Bath
MSNFAKLELNESVVEVPVIEGTEGEKAIDITKLRAQTGYITLDPGYGNTGSCLSAITFIDGEQGILRYRGIDIAELCEKSTFVEVSYLLIYGQLPTVEQYARFKEKIHHHSLIHEDMKSFFTSYPGHAHPMAILSSMVCSLSVYHPELLKPDQTIDERDETISRLLSKVRVLAAFAYKRSVGEAFVYTRPELDYISNFLHMMFTRPMRGYVPDELIRKVLDVLFILHADHEQNCSTSTVRMVGSSKANLFAAISAGICALWGPLHGGANQAVIEMLEEIHRAGGCYKKYIERAKDKNDPYRLMGFGHRVYKSYDPRAQILKKYCDEVLNYLGIDDPILEIAKGLEEVALTDPYFIERKLYPNVDFYSGIIYRALKIPTNMFTVMFALGRLPGWIAHWKEMLEDPGMRIARPRQIYIGERQRPYVPIAQR

SEQ ID NO: 11272 - protein, 321 aa, Hydrangea macrophylla
MAFTIPEVPLSSGGRKMPVLGLGTAADPPVDPETVRKAVTEALKLGYRHFDTAALYNSEQPLGDAIAEALGEGLIKSRDELFITSKLWCSDAHRENVEPALQKTLKNLKLEYIDMYLIHWPVSSKPGNYEYPIKKEDFLQMDYKSVWEAMEECQKLGLTKAIGVSNFSCKKLSDVLANAKVPPAVNQVEVNPCWQQKQLTEFCKSNGILVVAYAALGAVGTFYGTNRVMGSEVLNEIARIRGNTVAQVCLRWAYEQGIGVLVKSFNKERMEQNLQIFNWTLSDDESKKISEIPQGRACLGTDYTSVHGPFKTIEELWDGEF

SEQ ID NO: 11273 - protein, 161 aa, Paxillus involutus
VVLIGDSGVGKSNLLSRFTRNEFNLDSKSTIGVEFATRSINVDSKTVKAQIWDTAGQERYRAITSAYYRGAVGALLVYDISKHATYVNVTRWLKELRDHADSNIVIMLVGNKSDLKHLRAVPTEEAKNFSAENELSFIETSALDASNVESAFQTILTDVYR

SEQ ID NO: 11274 - protein, 324 aa, Hydrangea macrophylla
MASNYSNIPEVSMSSSSRKIPIVGLGTATFPPVGSKTVVAAVLQAIQIGYRHFDTASVYQTESDLGEAIAEALRLGLIKSREELFTTSKLWCSDAHAQHVVPTLQKTLKNLNLDYLDLYLVHWPVSVKHGTYDYPIKTEDIIPMDYESVWGAMEECHKLGLAKAIGVSNFSCKKLGHLLSFAKIPPAVNQVEMNPVWQQRKLVEFCKENGVLVGAFSPLGALGTSWGSNNVMESEILKEIAKAKGKTVAQVSLRWAYEQGVIVLVKSYRAERMQENLGIFDWELSDEDTKKIREIPQRRVHRGEEFISENGPFKSIEEFWDGEL

SEQ ID NO: 11275 - protein, 162 aa, Zea mays
LQAVIKRLMTDVPFGVLLSGGLDSSLVASVASRHLNETKVDRQWGNKLHTFCIGLKGSPDLKAAREVADYLSTVHHEFHFTVQEGIDALEEVIYHIETYDVTTIRASTPMFLMSRKIKSLGVKMVISGEGSDEIFGGYLYFHKAPNKKEFHEETCRKVKIFL

SEQ ID NO: 11276 - protein, 161 aa, Paxillus involutus
VVLIGDSGVGKSNLLSRFTRNEFNLDSKSTIGVEFATRSISVDGKTVKAQIWDTAGQERYRAITSAYYRGAVGALLVYDISKHATYVNVTRWLKELRDHADSNIVIMLVGNKSDLKHLRAVPTEEAKNFSTENELSFIETSALDASNVESAFQTILTDVYR

SEQ ID NO: 11277 - protein, 165 aa, Oryza sativa (japonica cultivar-group)
MSSEQQASAGQPVLCASGCGFYGNPATLDMCSVCYRQHCLLNGATMATGPSSSVAAASAATVATGAVTSDSCSVPSAEVNGAAFSSKNNPEPATVVEKKAPANRCASCKKKVGLLGFACRCGATYCGTHRYPEKHACGFDFKGASRDAIARANPLIKGEKLTNKI

SEQ ID NO: 11278 - protein, 283 aa, Triticum aestivum
  misc_feature (86)..(86): Xaa can be any naturally occurring amino acid
MSVVSLLGVNVLQNPARFGDPYEFEITFECLETLQKDLEWKLTYVGSATSNDHDQELDSLLVGPIPVGVNKFIFVADPPDTNKIPXAEILGVTVILLTCAYDGREFFRVGYYVNNEYDSDELNTDPPAKPILEKVRRNILAEKPRVTRFAIKWDSDDSAPPLYPPEQPEADLVADGEEYGAEEAEDEDEEESADGPEVPADPDVMIDDSEAAGAMVETVKATEEESDAGSEDLEAESSGSEEDEIEEDEEREDEPEEAMDLDGAGKRNAAISSSNNTDTTMAH

SEQ ID NO: 11279 - protein, 170 aa, Campylobacter jejuni subsp. jejuni NCTC 11168
MKNNPYIIWLTGLAGSGKTTIGQALYEKLKLKYKNLIYLDGDELREILGHYAYDRQGRIDMALKRAKFAKFLNDQGMMVIVTTISMFNEIYDYNRKQLKNYYEIYIECDMHELIQRDQKGLYTKALNKEIDNVVGVDIEFDKPEADLVINNSCRNNLEEKVELIIKKLAL

SEQ ID NO: 11280 - protein, 489 aa, Burkholderia fungorum LB400
MPEVARFLDAGPLGGVIDGRDEQAADGATFETLDPGTGEHLATVAAMGPADVDRAVDAARRAFARSGWATMHPNDRAIWLHRLADEVERRKAIIGQIEALDAGKIEQQAQGDVQSFVDTLRYFNELALNTERRSALPVSGYEAWTTRQPWGACGFIVPWNFPMVLIGWNISPALAAGNTVVIKPAEDTPLSAIYLARLAREIGFPDGVINVVTGLGEIAGAALSRHPGLRRMSFTGSPEVGRMVAEACGRNLVPCKLELGGKGAAVIFDDVNIEETADKLARAITFHTGQVCCDATRWLVHESIFERFVDASVAALQRTKIGYQLDPGAEMGPVVSAKQRERVLGYLERGQRDGARAVLKGGAVDVAGHDGFYVSPALLAGSLENVAAREEIFGPVAFLAPFRDEAQAVELANDTDYGLANSVWSHDPRRASRVAEAMVAGNSWINAHNLFPLGVPYAGVNRSGMGGGVNSVETLFDYWRSQSMVRPTR

SEQ ID NO: 11281 - protein, 511 aa, Oryza sativa (japonica cultivar-group)
MAMPCRLHGDILLLLLGAVAVAVAHPAANEFCAAVGGGSGGCGVGGGGGGDGRRILIRGGTVVNAHRVEEADVYVEDGVIVAVRPNIPVGDDHVKVIDATGKYVMPALAGGTTMHIDFVIPVNGNLTAGLESYKQKAEKSAMDYGFHMAITKWNDDVSREMETMVKEHGINSFKFFMAYKGSLMVTDDLLLQGLQKCKSLGALAMVHAENGDAVAEGQQRMIDLGITGPEGHALSRPPVLEGEATARAIRLAKFVNTPLYVVHVMSIDAMDEIAKAKREGQRVIGEPVVSGLVLDDSWLWDPDFMIASKYVMSPPIREAGHNKALQVALSSGILQLVGTDHCTFNSTQKAFGSDDFRKIPNGVNGIEERMHIIWDSMVETGRISVSDYVRVTSTECAKIFNIYPRKGAILEGSDADIIILNPERSFVMGAHTHHSRSNTNVYEGRKGKGMVEVTISRGRVVWEDGILNVVPGSGRYVRTPPYSYLFDGIEKSDAAYRASLRAPVKRGKAAA

SEQ ID NO: 11282 - protein, 371 aa, Saccharomyces cerevisiae
MFRSVATRLSACRGLASNAARKSLTIGLIPGDGIGKEVIPAGKQVLENLNSKHGLSFNFIDLYAGFQTFQETGKALPDETVKVLKEQCQGALFGAVQSPTTKVEGYSSPIVALRREMGLFANVRPVKSVEGEKGKPIDMVIVRENTEDLYIKIEKTYIDKATGTRVADATKRISEIATRRIATIALDIALKRLQTRGQATLTVTHKSNVLSQSDGLFREICKEVYESNKDKYGQIKYNEQIVDSMVYRLFREPQCFDVIVAPNLYGDILSDGAAALVGSLGVVPSANVGPEIVIGEPCHGSAPDIAGKGIANPIATIRSTALMLEFLGHNEAAQDIYKAVDANLREGSIKTPDLGGKASTQQVVDDVLSRL

SEQ ID NO: 11283 - protein, 495 aa, Burkholderia cepacia R18194
MRAQNKFKTGLDIAKYTAKIMRADMAAYDADPAKYTQSLGCWHGFIGQQKMISIKKHFNSTERRYLYLSGWMVAALRSEFGPLPDQSMHEKTSVSALIRELYTFLRQADARELGGLFRELDAAKDATAKAAIQDKIDNHVTHVVPIIADIDAGFGNAEATYLLAKQFIEAGACCIQIENQVSDEKQCGHQDGKVTVPHEDFLAKIRAIRYAFLELGVDDGIIVARTDSLGAGLTKQIAVTSTPGDLGDQYNAFLDCEELSADQLGNGDVVIKRDGKLLRPKRLPSNLFQFRAGTGEARCVLDCITSLQNGADLLWIETEKPHIAQIGGMVSEIRKVIPNAKLVYNNSPSFNWTLNFRQQAYDALKAEGKDVSAYDRAQLMSVEYDETELAKLADEKIRTFQADAAREAGIFHHLITLPTYHTAALSTDNLAKEYFGDQGMLGYVAGVQRKEIRQGIACVKHQNMSGSDIGDDHKEYFSGDAALKAAGKDNTMNQF

SEQ ID NO: 11284 - protein, 73 aa, Brassica napus
MAFPSCVQCGTRQNPCRCKVVGPTLGFVAFLVTGVIEWPVGAVVYIFKHSKGRRIMGHPATVVYPKVSRSIPI

SEQ ID NO: 11285 - protein, 490 aa, Saccharomyces cerevisiae
MEATSSALSSTANLVKTIVGAGTLAIPYSFKSDGVLVGVILTLLAAVTSGLGLFVLSKCSKTLINPRNSSFFTLCMLTYPTLAPIFDLAMIVQCFGVGLSYLVLIGDLFPGLFGGERNYWIIASAVIIIPLCLVKKLDQLKYSSILGLFALAYISILVFSHFVFELGKGELTNILRNDICWWKIHDFKGLLSTFSIIIFAFTGSMNLFPMINELKDNSMENITFVINNSISLSTALFLIVGLSGYLTFGNETLGNLMLNYDPNSIWIVIGKFCLGSMLILSFPLLFHPLRIAVNNVIIWIEITYGGANPEEDPQVSEYTRASNLRPISMTVEDPAQPSDALDATSYNEQECLLPNGNFDNGSIESQENNNDERGTMAVAGDNEHHAPFVKSRFYWITALLLISMYTLALSVQSFALVLSFVGATGSTSISFTLPGLLGYKLIGLDSLAIGKMIPPKDRFYKRCSLLLVFYGLSVMFLSLYVTVFNRSDEA

SEQ ID NO: 11286 - protein, 449 aa, Zea mays
MYRAKRAALSPKVKRRVGKYELGRTIGEGTFAKVRFAKNTENGEPVAIKILDKEKVKRHRLVEQIKREICIMKLVRHPNVVRLFEVMGSKARIFIVLEYVTGGELFEIIATNGRLKEDEARKYFQQLINAVDYCHSRGVYHRDLKLENLLLDAAGNLKVSDFGLSALTEQVKADGLLHTTCGTPNYVAPEVIEDGGYDGATADIWSCGVILFVLLAGYLPFEDDNIIALYKKISAAQFSCPSWFSAGAKNMITRILDPNPTTRITISQILEHPWFKKGYKPPVFDEKYQTSLDDVDAAFGDSEDRHVKEETEDQPTSMNAFELISLNQALNLENLFEAKEEYKRETRFTSQCPPKEIITKIEEAAKPLGFDVQKKKYKMRMENPKAGRKGNLNVATEVFQIAPSLHVVELKKAKGDTLEFQKFYRSLSTQLKDVVWKCDGEVDGNSAAA

SEQ ID NO: 11287 - protein, 619 aa, Zea mays
  misc_feature (26)..(26): Xaa can be any naturally occurring amino acid
MDSDYGVPRELSEVQKKRTLYQPELXPPCLQGTTVRVEYGDAAIAADPAGAHVISHAFPHTYGQPIAHFLRKTAVVPDAKVISEHQAVRVGIVFCGRQSPGGHNVVWGLYEAIKAHNQNSKLIGFLGGSDGLLAQRTLEITDKVIASYKNQGGYDMLGRTKDQIRTTEQVNGAMASCQALKLDALVIIGGVTSNTDAAQLAETFAEAKCATKVVGVPVTLNGDLKNQFVETTVGFDTICKVNAQLISNVCTDALSAEKYYYFIRLMGRKASHVALECALQSHPNMVILGEEVAASKLTIFDITKQICDAVQARAEKDKNHGVILIPEGLVESIPELYALLQEIHGLHGKGVSVENISSQLSPWASALFEFLPPFIRKQLLLHPESDDSAQLSQIETEKLLAQLVETEMNRRLKEGTYKGKKFNAICHFFGYQARGALPSKFDCDYAYVLGHVCYHIIAAGLNGYMATVTNLKNPVNKWRCGATPISSMMTVKRWSRGPSATQIGKPAVHMASVDLKGKAYDVLRQNSSSFLLEDVYRNPGPLQFEGPGADSKPISLCVEDQDYMGRIKKLQEYLEKVKRIVKPGCSQDVLKAALSAMSSVTETLNIMTSSSTGQTPLSH

SEQ ID NO: 11288 - protein, 318 aa, Burkholderia cepacia R18194
MLEPEIAAFVAAVDAWYPADAAARSPGEQRRLYDRFAAEWTPAALPAGIVQQDAVWHAPDGHKIALRRYTSAHGTPRGTVLFFHGGGFVVGSLDSHALITAQLAADTGLDVIAVDYRLAPEHRAPAALEDCLDVTRAARDARWPFGPCVHPLTLAGDSAGGMLAAAVVTALRDAGEGGIDGIALVYPMLGFEPQSPARETEAHAPMLTLDDVHRYRALYWEGGLSDALGDGNPLLHASVPLAASRFDGLPPVLAIGAEHDPLRDDARVYVERIRAARGVAHYWMGEGLVHGCWRALGTSPQAALMHRTVGGFLLAPHA

SEQ ID NO: 11289 - protein, 164 aa, Brassica napus
MPALACVDTYTTDVFIPPSPQPSSTAAVVDTWSPSLSSSLYRIDGWGAPYFSANSSGNISVRPHGSNTLPHQDIDLLKLVKKVTDPKQTGGLGLHLPVIVRFPDVLKNRLECLQSAFDFAVQSQGYESHYQGVYPVKCNQDRFVVEDIVRFGSQFRFGLEAGSN

SEQ ID NO: 11290 - protein, 181 aa, Brassica napus
MASSMLSSAAVVTSPAQATMVAPFTGLKSSSAFPVTRKANNDITSIVSNGGRVSCMKVWPPVGKKKFETLSYLPDLTEVELGKEVDYLLRNKWIPCVEFELEHGFVYREHGSTPGYYDGRYWTMWKLPLFGCTDSAQVLKEVQECKTEYPNAFIRIIGFDNNRQVQCISFIAYKPPSFTGA

SEQ ID NO: 11291 - protein, 164 aa, Methylococcus capsulatus str. Bath
MNIYEFEVRTLEGETVRLDGYRGKVLLIVNVASRCGFTPQYAGLEALYRRHRNAGLVILGFPCNQFGGQEPGSETEIRRFCSSRYEVSFPLFAKIEVNGEHTHPLYAYLKSAQPGLLGSEAIKWNFTKFLVGRNGEVVKRYAPTATPESIEPGLLPLLTVGSGG

SEQ ID NO: 11292 - protein, 370 aa, Zea mays
  misc_feature (76)..(76): Xaa can be any naturally occurring amino acid
MRRRRMGALHVVGEPRISFRQQPAAVVAKNGGHGAVVEEIHGLIRVYKDGHVERLPAIPAVPCTWGGTAPGRAGRXVARDVVVDPATGVWARLYAPTSAGDGARRPVVVYFHGGGFCVGSAAWSCYHEFLAQLAARAGCAVMSVDYRLAPEHRLPAAFDDGLAAVRWLRHQAAASASASACCNDDLSWWRARCGFDRVFLMGDSAGASIALHVAARLGQGQLGALPPLTVRGPVLIQPFLGGEGRTASEKNVAQPPRSALTLATSDCYWRLALPAGASREHPWCNPLSGRAAPRLETTPLPPLLVCVSETDILRDRNLELCRALREAGKRVEQAVYGGVGHAFQVLHNCHLSQPRTQEMLAHIKAFVSAR

SEQ ID NO: 11293 - protein, 432 aa, Chromobacterium violaceum ATCC 12472
MTTREQRIAAIQKDWDENPRWKGIKRGYSAADVERLRGSLQVEHSLARHGAEKLWQLVNNEPYINCLGALTGGQAMQQVKAGVKAIYLSGWQVAADNNEYSAMYPDQSLYPVDSVPKVVERINNAFTRADEIQHAKGLDKGDKGYVDYFAPIVADAEAGFGGVLNAYELMKAMIRAGAAGVHFEDQLASVKKCGHMGGKVLVPTQEAIQKLIAARLAADVYGVPTLVIARTDAEAADLLTSDVDPNDEPFLTGERTAEGFYKTKKGLEQAISRAVAYADYADLVWCETGTPDLEFARKFAEAVHAKHPGKLLAYNCSPSFNWKKNLDDATIAKFQRELGAMGYKYQFITLAGIHSMWFNMYDLAQDYVARGMSAYVEKVQEPEFAARDRGYSFVSHQQEVGTGYFDDVTTVIQGGTSSVTALTGSTEEEQFH

SEQ ID NO: 11294 - protein, 531 aa, Zea mays
  misc_feature (305)..(305): Xaa can be any naturally occurring amino acid
MPGILYQLVVAAAICALSSGSIAVASGLNATDSFLVCLVGAGVPPRLLQTPASPSYSATLLSSVRNLRYVTSDIQRPVAIVAATEPAHAQAAVRCGRRHGVRVRARSGGHDYEGLSYASLDPRERFAVLDLAAFRDVRVDSARAEAWAGSGATLGEVYYAVAAASRVLAFPAGICPTVGVGGHLSGGGFGTLMRRYGLAADNVIDAVLVDADGRLLNRTTMGEDLFWAIRGGGGESFGVILSWKLRLVRVPETVTVFTVRRSINQSASQLITKWQAIAPALPSDLILRVAVRSQPARFEALFLGXAARLLEHMRAHFPDLGVTQSDCEEISWIQSTVYFAFYSSSKPLELLLDRSGETPRYVKAKSDYVQEPIPRHVWERTWSWLEKPEAGLLILDPYGGRMGSISPSATPFPHRKGNLYNLQYYSYWFENGTAALEKRMSWVRGLYEEMEPYVSKNPRTGYVNYRDLDLGTNELEDNVTSYARARIWGEKYFKGNFERLAAVKAMADPDDFFRNEQSIPPLPAAKGWGFI

SEQ ID NO: 11295 - protein, 205 aa, Triticum aestivum
GVSKVLLLLSAYLDHKVQENEELLDSSKTKAARGIFHGQRVPELSIKLYAERIFKYAKCSPSCFVLGLIYIERYLQQPNIYMTSFSVHRLLIASVVVAAKFIDDAFFNNAYYGRVGGITTREMNMLELDLLFSLDFRLKVDIETFGSYCLQLEKEALVLVLERPIQVQAANVTKHLICNSSADETCKHELVRERYSSQAVHGCSW

SEQ ID NO: 11296 - protein, 368 aa, Malus x domestica
MGKGGQSCNGVVRDAKPVEQENMAAWLVDVNTIKILPFKLPAIGPNDVRIRIKAVGICGSDIHYLKTMKCGDFQVKDPMVIGHECAGIVDKVGSEVKHLVPGDRVAVEPGISCARCQQCKGGRYNLCPDMKFFATPPVHGSLANQIVHPADLCFKLPENVSLEEGAMCEPLSVGVHACRRANVDPETTVLIIGAGPIGLVSVLAARAFGAPRIVIVDMDDKRLAMAKSLGADEAVKVSTKMEDLDDEVAEIKEAMISEVDVTFDCVGFNKTVSTGLNATRPGGKVCLVGMGHGVMTVPLTPAAAREVDVVGVFRYQKTWPLCLEFLRSGKIDVKPLITHRFGFTEKEVEEAFATSARGGNAIKVMFKL

SEQ ID NO: 11297 - protein, 245 aa, Zea mays
MDKPVAPGIIKEELLEQQPPTQDGVGGGGDAPRPMEGLHEVGPPPFLTKTFDLVEDPATDAVLSWSRAGNSFIVWDPHVFADGLLPRLFKHSNFSSFVRQLNTYGFRKVDPDRWEFANEGFLRGQRHLLKMIKRRKPPSAVAPLRQQRAPASCLEVGEFGFEEEIDRLKRDKNILITEVVKLRQEQQSTKDHVRAMEERLRVAEQKQVQMMGFLARAMRNPEFFQQLAQQQDKRKELEDTKKKKK

SEQ ID NO: 11298 - protein, 200 aa, Nicotiana tabacum
MAFAGTTQKCMACDKTVYLVDKLTADNRIYHKACFRCHHCKGTVKLGNYNSFEGVLYCRPHFDQLFKQTGSLDKSFEGTPKIVKPQKPIDSEKPQVAKVTSMFGGTREKCFGCKKTVYPTEKVSANGTPYHKSCFQCSHGGCVISPSNYTAHEGRLYCKHHHIQLIKEKGNLSKLEGDHEMNSTTTTEVTAESYTADQVD

SEQ ID NO: 11299 - protein, 488 aa, Pseudomonas fluorescens PfO-1
MIQTETDMQLIWLRSDLRQHDNTALAAAAERGPSVAVYLLSPQQWQEHDDAPCKIDFWLRNLHKLSKSLGDLNIPLLIRTAPHWDQAPAVLLELCRQLKIEAVHVNEEYGINESRRDAAVAKALQAEGITFHSYLDQLLFKPGSVLTRTGTYFQVFSQFRKVCYEHLHRSMPSLKQAPGKQSALNIASDPVPEAIEGFPTPGASLRALWPAGETEARRRLDTFADAQIDYYKSERDFPAKPGTSQLSAYLAAGVISPRQCLHAALQSNQGEFESGKVGAVTWINELLWREFYKHILVGYPRVSRHRAFRPETEDLAWRNAPEDLAAWQEARTGLPIIDAAMRQLLETGWMHNRLRMVVAMFLTKNLLIDWREGERFFMRHLIDGDLAANNGGWQWSASTGTDSAPYFRIFNPVSQSEKFDSEGLFIKHWLPELAGLNKKEIHNPASVGGLFGVADYPAPIVNLSASRERALAAFKNLPSRSSQGESDE

SEQ ID NO: 11300 - protein, 303 aa, Aspergillus nidulans FGSC A4
MEETRVNLLEYLRSKTQVDLDTFDITGISFPRLLEHTLNLETVAAGLHDQFPEVTFDELGVEVGAVLLAGEMVPAFTGNLHLMVNPSYAYSREKVIEAAKSTPSPISLYPVLPATWEGLQACRDLQAFKIKTLGTTLFSMEQAILAGEAGCVSISPFVHSLRILVDPEYKDPHPVYNLSAQAQRWYRRQSLPTKVKSCSTVGVDELLELAGIDALTIIPDDLRALQSTYRDANQVFKLSIVENGTQNDDKIEHISYINDEEKYRADFQKADEGRAKAKTAEAIDIFCGFQAKAEDVIRKAKGQ

SEQ ID NO: 11301 - protein, 119 aa, Ehrlichia canis str. Jake
MIQKNTLLDVADNSGARKVLCIGLLNGKKSASVGDVIVVSTKVITPRGKVSKGKVYKAVVVRVKKAVRRLDGSIIRFSSNAVVLINDQGDPLGTRVFGPIKKLPFGLFSKVMSLAVEVL

SEQ ID NO: 11302 - protein, 232 aa, Brassica napus
PRVRLRSSFRLLYITRTNLLVRASPSSLSRLPSKFTSAKQLVRSHHQIPLSTTGAKLSRSEHSMAASSEPKSIYDFTVKDAKGNDVDLSTYKGKVLLIVNVASQCGLTNSNYTELAQLYQKYKDHGFEILAFPCNQFGNQEPGSNEEIVQFACTRFKAEYPIFDKVDVNGDSAAPIYKFLKSSKGGLFGDGIKWNFAKFLVDKDGNVVDRYAPTTSPLSIEKDLKKLLGVTA

SEQ ID NO: 11303 - protein, 363 aa, Buchnera aphidicola (Schizaphis graminum)
MKKKFRIAVLPGDGIGPEVMREAYKILNILERKFFLKLELREFDIGGIAIDREGIALPEKTLRGCENSDAILFGSVGGKKWDYLPIESRPERASLLPLRKHFNLFSNLRPAKLRVDLKNLSPLRSDIVRDGFDILCIRELTGGIYFGKPKGRFKNKNGEYAFDTEIYYDFEIERIANLAFELASSRRCKVCSIDKANVLESSVLWREIVKKVSKNYPDVHLSHLYIDNACMQIIKNPTQFDILLCSNIFGDIISDECAMITGSIGMLPSASLNNQKFGLYEPAGGSAPDIEGKNIANPIAQILSLSMLIRYSMNLNEIADKIDLSVHYALKEGYRTLDISDGKNYIKTNEMGDIIAEFLDNGK

SEQ ID NO: 11304 - protein, 386 aa, Aspergillus niger
MATATVLEKANIGVFTNTKHDLWVADAKPTLEEVKNGQGLQPGEVTIEVRSTGICGSDVHFWHAGCIGPMIVTGDHILGHESAGQVVAVAPDVTSLKPGDRVAVEPNIICNACEPCLTGRYNGCENVQFLSTPPVDGLLRRYVNHPAIWCHKIGDMSYEDGALLEPLSVSLAGIERSGLRLGDPCLVTGAGPIGLITLLSARAAGASPIVITDIDEGRLEFAKSLVPDVRTYKVQIGLSAEQNAEGIINVFNDGQGSGPGALRPRIAMECTGVESSVASAIWSVKFGGKVFVIGVGKNEMTVPFMRLSTWEIDLQYQYRYCNTWPRAIRLVRNGVIDLKKLVTHRFLLEDAIKAFETAANPKTGAIKVQIMSSEDDVKAASAGQKI

SEQ ID NO: 11305 - protein, 384 aa, Chloroflexus aurantiacus
MARKHPYEPLPWNDLPSVSWNFVWREPIGVCAQIIPWNYAFCMAAWKLGPALATGNTVVFKPSSLAPLSTLAIFQTIHDLNLLPKGVINLVLGPGGDVGEYLVTHPAVDKVAFTGSTEVGRKIMALAAPHIKRVTLELGGKNAMLILPDADLDLVVDGVLWGAFYHSGQLCEAGSRLLVPHALHDTLVERLVERVRGMRIGDPMDLETDIGPLISERQREKVEYYIAVGREEGATVVIGGGRPIGEAFANGHYVEPTIFTGVRPEMRIAREEIFGPVLSVIAYDEIGEAIRIANDSIYGLAASVWSRDLQHALSVVRRIRAGTVWINEHHVLNPRAPFGGYRQSGFGREMGRYGLDEYTEVKHIHVDLMQRRQGRLWWDTLLPE

SEQ ID NO: 11306 - protein, 476 aa, Pseudomonas syringae pv. syringae B728a
MYPDVQLYIDGQWRASRDNRTLSVINPATGEALGAVAHAGIADLDEALAAAERGFATWRATSAYDRYKLMQKAANLVRERADSIARIMTQEQGKPLAEARMETLSAADIIDWLAEEGRRSYGRLVPSRNVSIEQKVIKEPVGPVAAFTPWNFPINQVVRKLSSALAAGCSIIVKAPEETPASPAELIRAFADAGVPAGVIGLVYGDPAEISGYLIPHPVIRKVTFTGSTPVGKQLAALAGKHMKRATMELGGHAPALVFDDADIDLAARVLATAKFRNAGQVCVSPTRILVQRKVLDAFTEKFVGLTREIKVGNGLEAGTTMGPVANDRRIPALVDLIDDAVRGGATLSAGGKAGEGPGYFFEPTVLSGLKPHMRIMNEEPFGPVALLVPFDTLEEAIAESNRVPFGLASYAFTTSMKTAQALSTYIEAGMLSINHQGIGLPEVPFGGIKDSGYGSEGGTEAIEAYLNTKLVTQYN

SEQ ID NO: 11307 - protein, 245 aa, Glycine max
  misc_feature (50)..(50): Xaa can be any naturally occurring amino acid
MTSASELFHSRRHRLGRSALDLGLDTELNAADSLRRHYHLRRLRHHPGAXASDRIDGRNLREMSIRFFDSEENVRSSLRGSDSERLPVGVVLARARLLQRLRGEPLSTNRQYDRDSFGEDPESESSNEDPSGASLVTELTSQMARSQFLQELSTKPPGLTQEALDCLHQEVFSSNASEIGLDSRVLQDCSICLESFTDGDELIRLPCGHKFHSVCLDPWIRCCGDCPYCRRCIVVNTHSSLNEDE

SEQ ID NO: 11308 - protein, 72 aa, Brassica napus
  misc_feature (64)..(64): Xaa can be any naturally occurring amino acid
MDPMDIVGKSKEDASLPKATMTKIIKEMLPADVRVARDAQDLLIECCVEFINLISSESNEVCNXEDKRTIAP

SEQ ID NO: 11309 - protein, 388 aa, Zea mays
MHSDERLFYKLLIDNVVELLPFVYTPTVGEACQKYGSIFGRPQGLYVSLKDKGKVLEVLRNWPHRNIQVICVTDGERILGLGDLGCQGMGIPVGKLALYTALGGVDPSVCLPITIDVGTNNEKLLNDEFYIGLRQKRATGEEYDELIEEFMSAVKQFYGEKVLIQFEDFANHNAFDLLEKYSKSHLVFNDDIQGTASVVLAGLLAALKMVGGTLAEQTYLFLGAGEAGTGIAELIALEISKQTNAPIEECRKKVWLVDSKGLIVDSRKGSLQPFKKPWAHEHEPLKTLYDAVQSIKPTVLIGTSGVGRTFTKEIIEAMSSFNERPIIFSLSNPTSHSECTAEQAYTWSQGRSIFASGSPFAPVEYEGKTFVPVHAYMIYICCNVVKAN

SEQ ID NO: 11310 - protein, 341 aa, Chromobacterium violaceum ATCC 12472
MKALAKLKAAPGLEMTDVPLPEVGHNDLLIKIVKTAICGTDIHIWNWDEWSQKTIPVPMHVGHEYVGVVAGMGSEVQGFKIGQRVSGEGHITCGYCRNCRAGRRHLCRNTTGVGVNREGAFAEYLVIPAFNAFPIPDDISDDLASIFDPFGNAVHTALSFNLVGEDVLITGAGPIGIMAVAIAKHVGARHVVITDVNDYRLELAKKMGATRAVNVAREDLKAVMQELHMSEGFDVGLEMSGNPQAFRQMLETMNHGGKVALLGIPPSNTAIDWNQVIFKGLEIKGIYGREMFETWYKMVALIQSGLDISPIITHHFKVDEFEQGFAAMLSGQSGKVILDWR

SEQ ID NO: 11311 - protein, 405 aa, Zea mays
MKPPSLVHCFKLLVLLALARLTMHVPDEDMLSPLGALRLDGHFSFHDVSAMARDFGNQCSFLPAAVLHPGSVSDIAATVRHVFSLGEGSPLTVAARGHGHSLMGQSQAAQGIVVRMESLRGARLQVHDGFVDAPGGELWINVLRETLKHGLAPKSWTDYLHLTVGGTLSNAGVSGQAFRHGPQVSNVNQLEIVTGRGDVVTCSPEDNSDLFYAALGGLGQFGIITRARIALEPAPEMARWIRVLYSALESFTEDQEMLIMAENSFDYVEGFVIINRTGVLNNWRASFKPQDPVEASHFQSDGRVLYCLELTKNFNSDDTDTMEQEVTVLLSRLRFIQSTLFHTDVTYLEFLDRVHTSELKLRAQGLWEVPHPWLNLLIPRSSIRRFAKEVFGMTLNDSNNGSILL

SEQ ID NO: 11312 - protein, 490 aa, Novosphingobium aromaticivorans
MGVTIPPLERSDFLTGQPLVDGTEICAGSTYAVTNPATGKTLANVVKLGAAQTRRAIESNSRALIDWRKRPAQERARLLHDWLALVRLHRHDLGLLMTAEQGKPLAEALGEVDYAASFIQWFAEEARRVYGEVIPASADRRIVVIRQPVGVAGAITPWNFPAAMITRKVAPALAAGCTVTLKPSELTPMTAFALAKLAREAGVPPGVFNVVCGDAPEIGSVLTSHPDVTKFTFTGSTAIGKLLTAQCAATLKRVSMELGGNAPLLVFDDADLDQAVEGAIASKFRNTGQTCVCANRILVQSGIHDRFVEALAARVSAFRVGNGLEGATDQGPLITASALAKVQGHVADAVAQGAQLVTGGKRHEAGELFFQPTVLTGARPAMRLADEETFGPVAPVFRFETEAEALALANATHSGLAAYAFTRDIDRAWRVSEGLETGMVGLNSGIVSTETAPFGGIKESGLGREGSRHGIEEFLEMKTISVGVRPESPV

SEQ ID NO: 11313 - protein, 361 aa, Yarrowia lipolytica
MRLAIQAVFLLATLMWLVAAQADFYAVLGLKKGASDKDIKKAYRTLSKKYHPDKNPRNEEAHQTFIEIGEAYEVLSDEEKRGKYDKFGHEGLKNGGGGGTNPFDLFAQFFGGGGGGQRRGVPKGPNTETHIDVSMKRMFKGFDMDLQVNLQGICSSCKGSGSADGVNHKCDGCDGSGVVIQVAQMGMMIQKFQQQCPKCQGKGHLISNPCNKCGGQKVQREDRKYNVYIEPGTPRVHSYSFEEEADKSPDHVAGDLIVQVREAPTENMGYRRRRNDLFRTEALSLKEALHGGWTRKIPFLDEESEVVLSRKKGEPTQHGHIEVIKNHGMPQMGVDDSHGDLYIKYVIVMPMGASSKVRDEL

SEQ ID NO: 11314 - protein, 239 aa, Methanococcus maripaludis S2
MARTKKANDEVATDSDSLKLKVAKQAAKLVKDEMVVGLGSGSTANLFIQELGKRVVEEELYIYGVPTSFDSRMMASNSGIPLISLDQCGEIDIAIDGADEVCKKTLSLIKGGGGCHTMEKIVDYHAKEFVVLADEGKLVESLGDKTAVPLEVIPFAYSTVLNKLLDMNTAPAIRSGSGKMGPVITDNGNMIIDVFINIEDAEETETMLNNIPGVLENGIFSKCDKVLVGTSKKVEILKK

SEQ ID NO: 11315 - protein, 162 aa, Dechloromonas aromatica RCB
MKRRFLIALFIFGSFFGSTAALADAATEAATAADPVAEKRLQKLSEELRCLVCQNQTIADSNAELAQDLRREVRTMIKDGKTDKEIVDFMVVRYGDFVLYRPPVKGITLLLWGGPIVLMLLGLFMLQRYLRRRSTRIDAEDQPLSADDASRADALLKENDQK

SEQ ID NO: 11316 - protein, 291 aa, Saccharomyces cerevisiae
LVHVASVEKGRSYEDFQKVYNAIALKLREDDEYDNYIGYGPVLVRLAWHISGTWDKHDNTGGSYGGTYRFKKEFNDPSNAGLQNGFKFLEPIHKEFPWISSGDLFSLGGVTAVQEMQGPKIPWRCGRVDTPEDTTPDNGRLPDADKDAGYVRTFFQRLNMNDREVVALMGAHALGKTHLKNSGYEGPGGAANNVFTNEFYLNLLNEDWKLEKNDANNEQWDSKSGYMMLPTDYSLIQDPKYLSIVKEYANDQDKFFKDFSKAFEKLLEDGITFPKDAPSPFIFKTLEEQGL

SEQ ID NO: 11317 - protein, 479 aa, Novosphingobium aromaticivorans
MTQIEHWIGGTAVAATGGAYFDDLNPVDDSVYSRVPAGTAEDVNRAVENAHQAYLQHRDLPAAVREGWIAKAAEIMERDTAKFADVLVDEIGSPIAKAGFETRFAVSFLRAAIGVPRRIRGETIPSDTPGRFSMSLRQPVGVVAGITPFNVPLIKGIKQSAMALATGNAFVLLPSEAAPMIADLLAKLWKEAGVPDGLFNVVYGNGAEIGDVLTGHPKVASITFTGSSRVGKHIAEIAARNLKKYTLELGGKSPLVICADADLDKAVNAALFSIFMYQGQVCMGASRIYVERSIFDQFTKAFAAATGRANSGDLRDPTTMLGPIISERQRDRVRRHIDDARSKGAAVLAGGEWSGNSCAATILSGVTAEMTVFEEETFGPVTSLFPFDTLEEALELANNTEYGLSASIFTRDLDKALAFAQRAEAGMVHINAPTLHDEPHVPFGGTKASGFGREGTEADLEIMTEWKWVTIQSATEGGH

SEQ ID NO: 11318 - protein, 336 aa, Bacteroides thetaiotaomicron VPI-5482
MRIGILTSGGDCPGINATIRGVCKTAINHYGMEVIGIHSGFQGLLTKDIESFTDKSLSGLLNQGGTMLGTSREKPFKKGGVVSDVDKPALILQNIQEMGLDCVVCIGGNGTQKTAAKFAAMGVNIVSVPKTIDNDIWGTDISFGFDSAVSIATDAIDRLHSTASSHKRVMVIEVMGHKAGWIALYSGMAGGGDVILVPEIPYNIKNIGNTILERLKKGKPYSIVVVAEGILTDGRKRAAEYIAQEIEYETGIETRETVLGYIQRGGSPTPFDRNLSTRMGGHATELIANGQFGRMIALKGDDISSIPLEEVAGKLKLVTEDHDLVIQGRRMGICFG

SEQ ID NO: 11319 - protein, 192 aa, Zea mays
MSAVNITNVAVLDNPTAFLNPFQFEISYECLVPLDDDLEWKLIYVGSAEDENYDQQLESVLVGPVNVGTYRFVLQADPPDPSKIREEDIIGVTVLLLTCSYMGQEFMRVGYYVNNDYDDEQLREEPPAKVLIDRVQRNILADKPRVTKFPINFHPEPSTGPGQQQQQEPQTTSPENHTGNGEANGSKPEADQ

SEQ ID NO: 11320 - protein, 234 aa, Zea mays
  misc_feature (82)..(82): Xaa can be any naturally occurring amino acid
  misc_feature (169)..(169): Xaa can be any naturally occurring amino acid
LSQVILTAASFNPHLWYRIGQASTDAKRIIDEERANARLEIGSAKASVQKIQSALKEQEKFSHRTGKQDVDELKEEVQEARXMDIENEIQVLCDQLAKKSSDSLRLLKELELHRSYGENDMPLYELKGLETLGSTLHIVVHDCASVDFWNSSIQWFRIQPEGSKKEIIXSTTKPAYAPEPHDVGRYTQAEVKSGGQTSITKTAGSVDPFFSFVAAGLVHYVEALVRRRETGYNV

SEQ ID NO: 11321 - protein, 136 aa, Brassica napus
STLSLSTVGKIDPAAGLGSYVEALVRKHDVDFNVVVTQMSGEDHTSESIHLFHVGKMRIKLCKGKTVIAKEYYSSAMQLCGVRGGGNAAAQAVYWQAKKGVSFVVAFESERERNAAIMLARRFACDCNVTLAGPED

SEQ ID NO: 11322 - protein, 230 aa, Arabidopsis thaliana
MAVSNSLTISPRKLRSDLYSYSYQNNSKTPLVISVLSSLIDRTLTRNERISRRALPSSGAGGKTQIFDCREIPDMTIQSYLGRIFRYTKAGPSVYVVAYVYIDRFCQTNPGFRISLTNVHRLLITTIMIASKYVEDLNYRNSYFAKVGGLETEDLNKLELEFLFLMGFKLHVNVSVFESYCCHLEREVSFGGGYQIEKALRCAEEIKSRQMIIQDPKHHHHHHQLARILL

SEQ ID NO: 11323 - protein, 358 aa, Aspergillus niger
MSTQNTNAQNLSFVLEGIHRVKFEDRPIPEINNPHDVLVNVRFTGICGSDVHYWEHGSIGQFIVKDPMVLGHESSGVVSKVGSAVTSLKVGDCVAMEPGIPCRRCEPCKAGKYNLCVKMAFAATPPYDGTLAKYYVLPEDFCYKLPESITLQEGAIMEPLSVAVHIVKQAGINPGQSVVVFGAGPVGLLCCAVAKAYGASKVIAVDIQKGRLDFAKKYAATATFEPAKAAALENAQRIITENDLGSGADVAIDASGAEPSVHTGIHVLRAGGTYVQGGMGRSEITFPIMAACTKELNVKGSFRYGSGDYKLAVSLVSAGKVNVKELITGVVKFEDAERAFEEVRAGKGIKTLIAGVDS

SEQ ID NO: 11324 - protein, 391 aa, Triticum aestivum
MKTFLVFALLALAAARAVAQISQQQQQPPFSQQQQPPFSQQQQPPFSQQQQSPFSQQQEQQQQPPFLQQQQPPFSQQPPISQQQQPPFSQEQQPPFSQQQQPPFSQQQQPPYSQQQQPPFSQQQQPPFSQQQQPPFSQQQQQTNKQQQQQPFTQQQPPFSQQPPISQQQQQQQQQQQPFTQQQPPFSQQPPISQQQQPPFSQQQQTPFSQQQQIPVIHPSVLQQLNPCKVFLQQQCIPVAMQRCLARSQMLQQSICHVMQQQCCQQLRQIPEQSRHESIRAIVYSIILQQQQQQQQQQQGQSIIQYQQQQPQQLGQCVSQPQQQLQQQLGQQPQQQQLAHGTFLQPHQIAQLEVMTSIALHNLPMMCSVSVPLYETTTSVPLGIGIGVGVY

SEQ ID NO: 11325 - protein, 129 aa, Picrophilus torridus DSM 9790
MSWTEAEVRELKVGRYILIDDSPCRIVDITMSKPGKHGEAKGRIVAIGVFDNQKHSVVYPVKHKVKVPVITKKNAQVLSIANNEVQLMDSETFETFVIPVDPADLEKIKPGMEVPYWEAMGQRKIMLQN

SEQ ID NO: 11326 - protein, 196 aa, Glycine max
  misc_feature (159)..(159): Xaa can be any naturally occurring amino acid
MSESEKQRVTGKVKWFDDQKGFGFITTDDSGEEFFVHQSSIRSDGFRSLALGESVEFLIDSDPEGRTKAVDVTGPDESPVQGTRGGGGGGRGSYGGGGGRGGYGGGGRGGRGGYGGGGGGYGGGGYGGGGGYGGGGGGGGGGGCYKCGETGHIARDCSXQGGGGGGRYGGGGGGGGSCYNCGESGHFARDCPSSAR

SEQ ID NO: 11327 - protein, 81 aa, Glycine max
SVQFIAFDIRFSVLFQSALFNFHSFLTVILLGICACTYFKMQFPAILDQKTGYICLHLAPFVNTDCNSYIVSADVNNVSFK

SEQ ID NO: 11328 - protein, 405 aa, Candida albicans SC5314
MTSMEPADTSIRSLNDINLQELANKQHQRNIYAQGSPTLEDSITSNGNDINNPNNNINKTNNNSNSSLSLTKKTSRHINKDTTTKGKYTLNDFQILRTLGTGSFGRVHLTRSIHNGRFYAMKVLKKQRVVQMKQIEHTNDERRMLKLAQHPFIIRMWGTFQDCHNLFMIMDYIEGGELFSLLRKSQRFPTPVAKFYAAEVFLAIEYLHSLDIIYRDLKPENILLDKNGHIKLTDFGFAKEVQDVTYTLCGTPDYIAPEVVATKPYNKSVDWWSFGILIFEMLTGYTPFYDPTPMKTYENILNGSITYPDYLPPDILDLLQKLIVKDLTQRLGNLQGGSDDVKNHPWFKEVIWERLLSRDIETPYEPPITSGVGDTSQFDRYPEDKDLDYGISGVEDPYRDQFQDF

SEQ ID NO: 11329 - protein, 363 aa, Buchnera aphidicola
MHKQYHIAVLPGDGIGPEVMQEAYKILQVLREHFSLFIKTKEFDIGGIAIDNHGIALPKKTLIGCENSDAILLGSIGGKKWDTLPINERPERASLLPLRKHFNFFCNLRPSNLYKELNFLSPLRNDIVKHGFDILCVRELTGGIYFGKPRGRVTKKKLMYAFDTEIYYKFEIVRIAHLAFKLARSRKHKLCSIDKANVLESSILWREVVEEVSKEYPDVILSHLYIDNVCMQIIKDPNQFDVLLCSNLFGDIISDECAMITGSIGMLPSASLNEKNFGLYEPAGGSAPDIQGKNIANPIAQILSLSMLIRYSMNLNKIANKIDNAVINVLKKGYKTMDISKDQNYLKTNEMGDVIADFLKRDK

SEQ ID NO: 11330 - protein, 286 aa, Pediococcus pentosaceus ATCC 25745
MEYVKLNDGNQMPQLGFGVFQVSDLSQAEQAVSDALDTGYRLIDTAAAYDNEEAVGAAIKKSGINRSEIFVTSKLWVDHFTYEKAQQGIEDSLNKLGLDYIDLYLLHQPYGDTAGAWRALIEAQKAGKIKSIGVSNFAPDQLMNLELMSDVKPALNQIEVSPWYQEGEAVGFAQSQDVQVEAWAPFAEGKHNIFSNETIAEIGQKYGKANGQVILRWLLQRGIVVIPKSVHKTRMAENLDVFDFELSDDDMQKMSSLDKNESQFFDHRDPEAIVSIFGESLKALRK

SEQ ID NO: 11331 - protein, 463 aa, Methanocaldococcus jannaschii DSM 2661
MFIDGKWINREDMDVINPYSLEVIKKIPALSREEAKEAIDTAEKYKEVMKNLPITKRYNILMNIAKQIKEKKEELAKILAIDAGKPIKQARVEVERSIGTFKLAAFYVKEHRDEVIPSDDRLIFTRREPVGIVGAITPFNFPLNLSAHKIAPAIATGNVIVHHPSSKAPLVCIELAKIIENALKKYNVPLGVYNLLTGAGEVVGDEIVVNEKVNMISFTGSSKVGELITKKAGFKKIALELGGVNPNIVLKDADLNKAVNALIKGSFIYAGQVCISVGMILVDESIADKFIEMFVNKAKVLNVGNPLDEKTDVGPLISVEHAEWVEKVVEKAIDEGGKLLLGGKRDKALFYPTILEVDRDNILCKTETFAPVIPIIRTNEEEMIDIANSTEYGLHSAIFTNDINKSLKFAENLEFGGVVINDSSLFRQDNMPFGGVKKSGLGREGVKYAMEEMSNIKTIIISK

SEQ ID NO: 11332 - protein, 472 aa, Chloroflexus aurantiacus
MSVGVAYTLTLRCQIENRPGMLGRLTTLIGEVGGDIGAIDIVRAERNILVRDITVRVQDEQHGEQLVAAINTLQNIKVLQVSDRVFLTHLGGKLATQSRVPLKTRDDLSLAYTPGVARVCRAIADDPEKVYALTWKGNSVAVVSDGSAILGLGNLGPEAAMPVMEGKAILFKELANIDAVPICLRSQDPDVIVQTVEQIAPSFGGINLEDIAAPNCFIVEGRLEESLDMPVMHDDQHGTAVVVLAALRNAVRIVGKRLADVRVVVNGIGAAGTAIIRTLIEAGVGEITAVDRFGILVEGDHARQTPMQRIIASQTNRERRRGDLAVALRGADVFIGVSKGNILTPDHIRVMSSDPIVFALANPIPEGDPDMLRQYARVVATGRSDQPNQINNVLSFPGIFRGALDVHARRITSAMRLAAAEALATVIPPEEMNEDYIVPSVFNRQVVPAIAAAVAQAAIAEGVARRTHMPGD

SEQ ID NO: 11333 - protein, 115 aa, Glycine max
MSAINITNVTALDNPAPFVSPFQFEISYECLTSLKDDLEWKLIYVGSAEDETYDQTLESVLVGPVNVGNYRFVLQADPPDPSKIREEDIIGVTVLLLTCSYMGQEFLRVGYYVNN

SEQ ID NO: 11334 - protein, 394 aa, Thermobifida fusca
MLSTQSADIVRATLPVVGAHLDEITSRFYSTMFSERPELLDGLFNRGNQANGEQRRALAGSIAGFASALLANPDERPDALLARIAHKHAAVAVTDDQYVIVHKYLFGAIADVLGDAATPEVIAAWDEVYWLMGGALIALEARLYAEKNADNGRTWREWTIVDRREETPDVFSLVLRPSDGGPLPEARPGQYVSVLHRMPDGIRQIRQYSISGGDEHTRRITIKRVRGTEHTPEGEMSALLYATAKAGDTLTVSAPFGDVVLTDSDRPLVFATAGIGCTPIVGMLNYLAATGATRRILALHADRSRAEHALWQETSTLIARLPHAQYVVWYEEGDGGLPGQMDLTGLEIPADAEVYLCGPLPFMREIRTQFLAAGVPAKDIHYEVFGPDLWLPAD

SEQ ID NO: 11335 - protein, 291 aa, Saccharomyces cerevisiae
LVHVASVEKGRSYEDFQKVYNAIALKLREDDEYDNAIGYGPVLVRLAWHISGTWDKHDNTGGSYGGTYRFKKEFNDPSNAGLQNGFKFLEPIHKEFPWISSGDLFSLGGVTAVQEMQGPKIPWRCGRVDTPEDTTPDNGRLPDADKDAGYVRTFFQRLNMNDREVVALMGAHALGKTHLKNSGYEGPWGAANNVFTNEFYLNLLNEDWKLEKNDANNEQWDSKSGYMMLPTDYSLIQDPKYLSIVKEYANDQDKFFKDFSKAFEKLLEDGITFPKDAPSPFIFKTLEEQGL

SEQ ID NO: 11336 - protein, 291 aa, Saccharomyces cerevisiae
LVHVASVEKGRSYEDFQKVYNAIALKLREDDEYDNYIGYGPVLVRLAWHISGTWDKHDNTGGSYGGTYRFKKEFNDPSNAGLQNGFKFLEPIHKEFPWISSGDLFSLGGVTAVQEMQGPKIPWRCGRVDTPEDTTPDNGRLPDADKDAGYVRTFFQRLNMNDREVVALMGAHALGKTHLKNSGYEGPQGAANNVFTNEFYLNLLNEDWKLEKNDANNEQWDSKSGYMMLPTDYSLIQDPKYLSIVKEYANDQDKFFKDFSKAFEKLLEDGITFPKDAPSPFIFKTLEEQGL

SEQ ID NO: 11337 - protein, 291 aa, Saccharomyces cerevisiae
LVHVASVEKGRSYEDFQKVYNAIALKLREDDEYDNYIGYGPVLVRLAWHISGTWDKHDNTGGSYGGTYRFKKEFNDPSNAGLQNGFKFLEPIHKEFPWISSGDLFSLGGVTAVQEMQGPKIPWRCGRVDTPEDTTPDNGRLPDADKDAGYVRTFFQRLNMNDREVVALMGAHALGKTHLKNSGYEGPWGAANNVFTNEFYLNLLNEDWKLEKNDANNEQWDSKSGYMMLPTDYSLIQDPKYLSIVKEYANDQDKFFKDFSKAFEKLLEDGITFPKDAPSPFIFKTLEEQGL

SEQ ID NO: 11338 - protein, 291 aa, Saccharomyces cerevisiae
LVHVASVEKGRSYEDFQKVYNAIALKLREDDEYDNYIGYGPVLVRLAWHISGTWDKHDNTGGSYGGTYRFKKEFNDPSNAGLQNGFKFLEPIHKEFPWISSGDLFSLGGVTAVQEMQGPKIPWRCGRVDTPEDTTPDNGRLPDADKDAGYVRTFFQRLNMNDREVVALMGAHALGKTHLKNSGYEGPYGAANNVFTNEFYLNLLNEDWKLEKNDANNEQWDSKSGYMMLPTDYSLIQDPKYLSIVKEYANDQDKFFKDFSKAFEKLLEDGITFPKDAPSPFIFKTLEEQGL

SEQ ID NO: 11339 - protein, 141 aa, Triticum aestivum
  misc_feature (71)..(71): Xaa can be any naturally occurring amino acid
  misc_feature (76)..(76): Xaa can be any naturally occurring amino acid
  misc_feature (81)..(81): Xaa can be any naturally occurring amino acid
  misc_feature (97)..(97): Xaa can be any naturally occurring amino acid
  misc_feature (130)..(131): Xaa can be any naturally occurring amino acid
MAPTVMASSATSVAPFQGLKSTAGLPVSRRSNGASLGSVSNGGRIRCMQVWPIEGIKKFETLSYLPPLKHXGLLKXVDYLXSAPKWVPCLEFKQGGXTSREHNASPGVYDGRYWAMWKLPMFRCTDPTRXXQVEEARGYLT

SEQ ID NO: 11340 - protein, 502 aa, Streptomyces atroolivaceus
MSDFSRRRLLKTSAVAGAGAVVVPGVAAAATPSAGVVTEASVNEAYEAQCSPAKLTGRIVRPHDPGYTDARLGWDQLFSHYPLVIVFAQNTQDVVNALTWARQNDVALRIRSGRHSLEGWSNVDSGLVIDISELKSVHLDSAARVATVGAGLNQLEAVTTLAKRNFAVTTGTEGTVGLAGATLGGGFGFLTRWLGMACDSLIGAEVVVAEGGECAKVIKADLTHNSDLLWALRGAGNGNFGIVTSLTYKVAPLKSVTYVQATWDGIGDLRRVFNAWQRTALHADDRLGTQVEIHRNQTLLFAVLAEGTPAEAKKLLAPILSVGSPQVSVQVGNWGEVYSGFQIPTANEPANWKFYSQFTRKPFPGKAIDVICSFMKHAPTDDSNFFTQAFGGAVRRSPRGGTAFPHRDALFYSEPGAGWGTRSDQPGICDPLTPQAQAWIAEFSQALRPYVDGAYVNVPNVGMQDWETAYWRGNFDRLREIKAKYDPHNVFQYDQSIPPASR

SEQ ID NO: 11341 - protein, 278 aa, Staphylococcus epidermidis ATCC 12228
METVQFYNGRTMPKIGLGTYRVKDGDECRESVKYAIERGYRSIDTAMIYGNEETVGQGIKEGLESTGLSREDLFITSKLWLTDFGRQNVEDAYRQSVAKLGLDYLDLYLMHWPGTNEAVMIDTWRGMEDLYKQNQVKNIGVSNFTPEHFEALLAQVSIKPVINQVEFHPYLTQNKLRKYLEAQNIIMESWSPLMNSQILHDEVINEVANEVGKTPAQVVIRWNIQHDVVVIPKSVTPHRIEENLDVWNFELSDNQMERIDQLNQDKRIGPNPLEFDGK

SEQ ID NO: 11342 - protein, 663 aa, Triticum aestivum
  misc_feature (51)..(51): Xaa can be any naturally occurring amino acid
MPAWWKGKGRSKSKAPAPAGDAGTIPAVRDGEKDRKNKKATSFDEALIGRXGRGKQLQQPAPAVGHPLPRPAFMPSASAPASASASASSGGSSSLGSSAASDEPLDLGIYRISDANRTPAIDSRKQSLVLEEGRFVVHNLASENNRSCEPSVSPRKEFQSNILDLPSDRTTYCHGRKSTEIVFATRMPSSPPSSRGKNCPTSPVHSRAFGQCPGSPTAWQEDARSSSSPHPLPLPPGSPCTSSRSLHSQWKKGKLLGSGTFGQVYLGFNSEGGQMCAIKEVKVIADDSNSKECLRQLNQEMLLLNQLSHPNIVQYYGSELSSETLSVYLEFVSGGSIHKLLQEYGPFGETILRNYTAQILSGLAYLHGRNTVHRDIKGANILVDPNGDIKLADFGMAKHISAYTSIKSFKGSPYWMAPEVIMNTNGYSLSVDIWSLGCTILEMATARPPWSQYEGVAAIFKIGNSKDIPDIPDHLSSEAKSFLKLCLQRDPAARPTAAQLIEHPWVKDQASVRSSRSGSGITRDMFSTSTDGSKATVKTSIELSSYRSLSPLRDTNLRMRNLVVPASSIPSISTHRASAISASNVRMNMSLPVSPCTSPLRQYRQSNRSCLPSPPHPAYSAGAANYSPINNVLYPTRPSNYLTDPWLETPRQKTQTFDSPRRL

SEQ ID NO: 11343 - protein, 249 aa, Cucumis sativus
MGKCYPVVSEEYQKAIEKAKRKLRGFIAEKNCAPLMLRLAWHSAGTFCKDSKTGGPFGTMRFKSELAHGANNGLDIAVRLLEPIKEQFPILSYADFYQLAGVVAVEVTGGPDVPFHPGREDKPEPPPEGRLPDATKGSDHLRDVFYTMGLSDQDIVALSGGHTLGRAHKERSGFEGPWTTNPLIFDKSYFTELLTGEKEGLLQLASDKALLSDPVFRPLVEKYAADEDAFFADYAEAHQKLSELGFADA

SEQ ID NO: 11344 - protein, 143 aa, Fusobacterium nucleatum subsp. vincentii ATCC 49256
MSMTQINWYPGHMKKTKDLIEENLKLIDVVLEIVDARIPLSSKNPNIASLSKNKKRIIVLNKSDLVSKQELDKWKKYFKEQDFADEVVEMSAETGYNVKKLYEAIEFVSKERKEKLLKKGLKKVSTRIIVLGIPNVGKCKINK

SEQ ID NO: 11345 - protein, 638 aa, Zea mays
  misc_feature (111)..(111): Xaa can be any naturally occurring amino acid
  misc_feature (139)..(139): Xaa can be any naturally occurring amino acid
  misc_feature (598)..(598): Xaa can be any naturally occurring amino acid
  misc_feature (616)..(616): Xaa can be any naturally occurring amino acid
  misc_feature (627)..(627): Xaa can be any naturally occurring amino acid
MGNTCVGPSITMNGFFQSVSTALWKTPQEGDALPAAANGPGGASPGRSQSALPKPASDVHHVAVQSEAPEPVKIAAYHSEPAPAVRSEAPEPVKIAASHSEPAPMAAKPGXGAAANASPSPSPRPRPQVKRVSSAGLLXLGSVLRRKTENLKDKYSLGRRLGQGQFGTTHLCVERATGKELACKSILKRKLATDDDVEDVRREIQIMHHLAGHPSVVAIRGAYEDAVAVHLVMELCGGGELFDRIVRRGHYTERKAAELARVIVGVVEACHSMGVMHRDLKPENFLFADHSEEAALKTIDFGLSIFFRPGQIFTDVVGSPYYVAPEVLKKRYGPEADVWSAGVIIYILLCGVPPFWAENEQGIFEEVLHGRLDFESEPWPSVSEGAKDLVRRMLIRDPRKRLTAHEVLRHPWVQVGGLAPDRPLDSAVLSRMKQFSAMNKLKKMALRVIAENLSEDEIAGLREMFKMIDADNSGQITFEELKVGLEKVGANLQESEIYALMQAADVDNNGTIDYGEFIAATLHLNKVEREDHLFAAFQYFDKDGSGYITADELQVACEEFGLGDVQLEDVIGEVDQDNDGRIDYNEFVAMMQKPPVGXSRRRPTCRTASASGSGGXRSGWPRPLCLXLPCCLGVGVDD

SEQ ID NO: 11346 - protein, 251 aa, Brassica napus
MNIAHTIFGVFGNATALFLFLAPSITFKRIIKNKSTEQFSGIPYPMTLLNCLLSAWYGLPFVSKDNTLVSTINGTGAVIETVYVLIFLFYAPKKEKAKIFGVFTAVRAVFATVALVSLFALHGNGRKLFCGIAATVFSIIMYASPLSIMRLVVKTKSVEYMPFFLSLFVFLCGTSWFIYGLIGRDPFVAIPNGFGCALGTVQLILYFIYCGNKGDKSTDDAEKDEKKTVEMKDEEKKKQNVVNGKQQEQQV

SEQ ID NO: 11347 - protein, 196 aa, Oryza sativa (japonica cultivar-group)
MASSPYHAAVGVAVLAILLAAPAAEAGAPTAAPLANYSLEDACKKTGPHYGLCIVTLSADRSAKSSDTVGLARVAVLAAQKNASETATYLSSIYDDDSIEKKTVQLQQCLEDCSERYEAAVEQLTDATVALDTGGYEEAMALVAAGQAEVKMCQRGFKAVPQHRNILTLRNREVDQLCSIAFTITKLIRVSPSAEE

SEQ ID NO: 11348 - protein, 299 aa, Triticum aestivum
  misc_feature (116)..(116): Xaa can be any naturally occurring amino acid
MENADVPNGATAPAPTQATPVVREQDRLMPIANVIRIMRRALPAHAKISDDAKEAIQECVSEFISFVTGEANERCHMEHRKTVNAEDIVWALNRLGFDDYVVPLSVFLHRMRDPEXGATGGAAAGGRPAVTSAPPRAAPPVLHAMPLHAQMQRPMYAPPALVQVQNQMQRPIYAPPAPMQVQNQVQWPMYAPPPPVQVQMQRGVYAPRAPVQGYTVGITPVRPNVGGQCHVFGGEQVVAQQYYGYGYGEGAYGAGSSKGGACADEGSSSNGVPVPGEGTGEPEPEPAAEGSQDKPVQSG

SEQ ID NO: 11349 - protein, 177 aa, Oryza sativa (japonica cultivar-group); identical to SEQ ID NO: 276

SEQ ID NO: 11350 - protein, 278 aa, Triticum aestivum
RLKRKTESVKEKYSLGRRLGQGQFGTTYLCVERSSGKEYACKSILKRKLVTDDDVEDVRREIQIMYHLAGHPNVISIRGAYEDAVAVHLVMELCAGGELFDRIVQKGHYTERKAAELARVIVGVVEVCHSMGVMHRDLKPENFLFVDQTEEAALKTIDFGLSVFFRPGQIFTDVVGSPYYVAPEVLKKKYGPEADVWSAGVIIYILLCGVPPFWAENEQGIFEEVLHGKLDFESDPWPSISEGAKDLVRRMLLRDPKKRLTAHEVLRHPWVQVGGLAP

SEQ ID NO: 11351 - protein, 530 aa, Triticum aestivum
  misc_feature (247)..(247): Xaa can be any naturally occurring amino acid
  misc_feature (304)..(304): Xaa can be any naturally occurring amino acid
  misc_feature (314)..(314): Xaa can be any naturally occurring amino acid
  misc_feature (354)..(354): Xaa can be any naturally occurring amino acid
MGEQKGNILMGKYEMGKMLGQGTFAKVYHARNIETSQSVAIKVTDKEKVLKGGLTDQIKREISVMKLVKHPNIVQMYEVMATKTKIYFVLEHVKGGELFNKVQRGRLKEDAARKYFQQLICAVDFCHSRGVYHRDLKPENLLLDENSNLKVSDFGLSTISECRRLDGLLHTSCGTPAYVAPEVINRKGYDGAKADIWSCGVILFVLLAGYLPFQDKNLMNMYKKIGKAEYKCPSCISSHMQRPRAGXDFLKAKDAVPAADMTATSDPLSCSNSATEGKEQGAKKLSNLNAFDIISLSTGLDLSXGMFEDNDKKXGESKFTSTNSASTIVSKIEDIAKCMRLKLVKKDGGMMRMXESFKPREGKGVMSIDAELFEVIHRFDVMVLNETVWDSSDVLTCSLDMKKELTPVFSVVELKETEADTMEYQIVLKQEMRPALKDISIGGARRAAAAISNSSYHEKNCAKCYILFTTRGTYQASVCFCNFYYSKFVIRLHCPCDVCVNFSSHLSMKIYLKAWCLQNRCQVFVQKRTC

SEQ ID NO: 11352 - protein, 476 aa, Bacillus thuringiensis serovar konkukian str. 97-27
MQNKIIVMFQKDFRLYDNPALFEAAQSGEVVPVYVHDETFSMGSASKWWLHHAIIDVKKQLEALGSTLIIRKGSTQEEILSLVEQLGITAVYWNICYDPDRLQFNQKMKMMLEHKGMICKEFNSHLLLEPWVIKKKDNTEYKVFTPFYNAFQKQVIHKPISKVQSIKGGNSLPVSLSVSELHLLPTIPWTSHMESIWEPTEEGAYKTWKEFFSSKLASYSEGRDFPNQNAHSMLAPYLSFGQISVKLIYHYLINKSTESQCSLFEKQVNSFIRQLIWREFSYYLLYHYPFTAYKPLNKSFEHFPWNNEEELLRVWQKGDTGYPFIDAGMRELWQTGFMHNRTRMAVASFLVKHLLIPWQEGAKWFMDTLLDADIANNTMGWQWVAGSGADASPYFRIFNPITQGEKFDKNGEYIREWVPELKDMPNKYIHKPWEAPEHILQKANIQLGHTYPLPVVDHKAARERALCAYKSMKEFV

SEQ ID NO: 11353 - protein, 341 aa, Actinomadura hibisca
MTEPEGPHAASLRLQSLLDGMRVAKVVQVLAELQVADAVADGPCKPAEIAADVGADPDALYRVLRCAASFGVFTEDEDGRFGLTPMAALLRTGTDDSHRDLFMMAAGDLWWRPYGELLETVRTGRPAAELAFGMPFYDYLGTDPAAAGLFDRAMTQVSKGQAKAILGRCSFERYARIADVGGGHGYFLAQVLRSSPRTEGVLLDLPHVVAGAPAVLEKHEVADRVQVVPGSFFDALPTGCDAYLLKAILINWPDADAERILHRVREAIGTDRDARLLVVEPVVPPGDVRDYSKATDIDMLAIIGGRQRTVAEWRRLLRAGGFELVGEPTPGRREVMECRPI

SEQ ID NO: 11354 - protein, 438 aa, Bacillus halodurans C-125
MKRFDLIIRSSTVVTETTTYRADVAIRNGIVSAITEPGSISSDDGPAIDGTGLHLFPGMVDVHVHFNEPGRTEWEGFASGSKSLAAGGVTTYFDMPLNSNPPTITREELDKKRQLANEKSLVDYRFWGGLVPGNIDHLQDLHDGGVIGFKAFMSECGTDDFQFSHDETLLKGMKKIAALGSILAVHAESNEMVNALTTIAIEEQRLTVKDYSEARPIVSELEAVERILRFAQLTCCPIHICHVSSRKVLKRIKQAKGEGVNVSVETCPHYLLFSLDEFAEIGYLAKCAPPLRERQEVEDLWDGLMAGEIDLISSDHSPSLPQMKTGKTIFEVWGGIAGCQNTLAVMLTEGYHKRKMPLTQIVQLLSTEPAKRFGLYPQKGTIQVGAEASFTLIDLNESYTLNASDLYYRHPISPYVGQRFRGKVKHTICQGKHVYQDH

SEQ ID NO: 11355 - protein, 419 aa, Zea mays
PTRPVLLRFADLIERHAEEVAALETWDNGKTLAQAAGAEVPMVARCVRYYAGWADKIHGLVAPADGAHHVQVLHEPVGVAGQIIPWNFPLLMFAWKVGPALACGNTVVLKTAEQTPLSALYVANLLHEAGLPEGVLNVVSGFGPTAGAALCSHMGVDKLAFTGSTGTGQIVLELAARSNLKPVTLELGGKSPFIVMDDADVDQAVELAHQAVFFNQGQCCCAGSRTFVHERVYDEFVEKSKARALKRVVGDPFRDGVEQGPQIDGEQFNKILRYVQSGVDSGATLVAGGDRVGDRGFYIQPTVFADAKDEMKIAREEIFGPVQTILKFSGVEEVIRRANATPYGLAAGVFTRSLDAANTLSRALRAGTVWVNCYDVFDATIPFGGYKMSGVGREKGIYALRNYLQTKAVVTPIKNPAWL

SEQ ID NO: 11356 - protein, 322 aa, Glycine max
  misc_feature (298)..(298): Xaa can be any naturally occurring amino acid
  misc_feature (310)..(310): Xaa can be any naturally occurring amino acid
MASSLRISRLISRSFSSTSFFSRGGNGFLGSRQSKFSTSAAIEEEPIKPSIQVEHTQLLIDGKFVDAASGKTFQTLDPRTGEVIAHVAEGHSEDVDRAVSAARKAFDHGPWPKMTAYERQRILLRVADLIEKHNDELAALETWDNGKPYEQAAKIEVPMLVRLIRYYAGWADKIHGLTVPADGPYHVQTLHEPIGVAGQIIPWNFPLLMFAWKVGPALACGNTIVLKTAEQTPLSALYAAKLFHEAGLPAGVLNVVSGFGPTAGAALASHMEVDKLAFTGSTDTGKVVLELAAKAILXPVTLELGGESPXIVCEDADVDQAV

SEQ ID NO: 11357 - protein, 344 aa, Datura stramonium
MEVLSSTHTNGSSLLKNGVITMNGHHNGNSDHRNGGTTVHENGRKLLGNSNSIKPGWFSEFSALWPGEAFSLKIEKLLFQGKSDYQDVMLFESATYGKVLTLDGAIQHTENGGFPYTEMIVHLPLGSIPNPKKVLIIGGGIGFTLFEVLRYPTVEKIDIVEIDDVVVDVSRKFFPYLAANFNDPRVTLVLGDGAAFVKAAQAGYYDAIIVDSSDPIGPAKDLFERPFFEAVAKALRPGGVVCTQAESIWLHMHIIKQIIANCRQVFKGSVNYAWTTVPTYPTGVIGYMLCSTEGPEVDFKNPVNPIDKDETHANSKLGPLKFYNTDIHKAAFILPSFARSMIES

SEQ ID NO: 11358 - protein, 122 aa, Buchnera aphidicola str. APS (Acyrthosiphon pisum)
MSITKEQILEAISEMSVMNVVDLITAMEEKFGVSASMSINSNNHNEKDLREEKTEFDIFLKVIGPNKVSVIKTVRSATGLGLKEAKDLVESAPTVLKENISKEDAESLKKTLEDVGAEIEIK

SEQ ID NO: 11359 - protein, 314 aa, Vibrio cholerae O1 biovar eltor str. N16961
MVNNSIQWFPGHMHKARKEIEEAIPQVDVIIEVLDARIPFSSENPLISHIRGEKPCVKVLNKRDLADPELTELWIAHLEQEKGVKAMAITTSNPQEVHKILELCRKLAPQREEIGKNIRTMIMGIPNVGKSTIINTLAGRAIAQTGNQPAVTRRQQRINLQNGIVLSDTPGILWPKVENPHSGFRLAATGAVKDTAMEYDEVAFYTVEYLAKHYPERLKERYQIDELPETDVELMEEIGRKRGALRAGARVDLHKASEILLHELRQGVLGQITLERPEMITEELQQVEIDEALKAEEKAKRKEERRKRYLRNKR

SEQ ID NO: 11360 - protein, 178 aa, Triticum aestivum
MGSNGGADGAGFNTDALEGVRAILLKPSESLDESTRIAGPDFNDAGLGLAGMLGSLASTGFQASHLGDAIDVVNQMLDWRLSHEKPSEDCDGAELEPKYRESVKCKIFLGFTSNLVSSGIRDVIRFLVQHHMVDVIVTSAGGIEEDLIKCLGPTYRGDFSLPGALLRSKGLNRIGNLL

SEQ ID NO: 11361 - protein, 496 aa, Staphylococcus aureus subsp. aureus COL
MELLKHLSQRQYIDGEWVESANKNTRDIINPYNQEVIFTVSEGTKEDAERAILAARRAFESGEWSQETAETRGKKVRAIADKIKEHREALARLETLDTGKTLEESYADMDDIHNVFMYFAGLADKDGGEMIDSPIPDTESKIVKEPVGVVTQITPWNYPLLQASWKIAPALATGCSLVMKPSEITPLTTIRVFELMEEVGFPKGTINLILGAGSEVGDVMSGHKEVDLVSFTGGIETGKHIMKNAANNVTNIALELGGKNPNIIFDDADFELAVDQALNGGYFHAGQVCSAGSRILVQNSIKDKFEQALIDRVKKIKLGNGFDADTEMGPVISTEHRNKIESYMDVAKAEGATIAVGGKRPDRDDLKDGLFFEPTVITNCDTSMRIVQEEVFGPVVTVEGFETEQEAIQLANDSIYGLAGAVFSKDIGKAQRVANKLKLGTVWINDFHPYFAQAPWGGYKQSGIGRELGKEGLEEYLVSKHILTNTNPQLVNWFSK

SEQ ID NO: 11362 - protein, 193 aa, Zea mays
MSAVNITNVAVLDNPTAFLNPFQFEISYECLVPLDDDLEWKLIYVGSAEDENYDQQLESVLVGPVNVGTYRFVLQADPPDPSKIREEDIIGVTVLLLTCSYMGQEFMRVGYYVNNDYDDEQLREEPPAKVLIDRVQRNILADKPRVTKFPINFHPEPSTGPGQQQQQQEPQTTSPENHTGNGEANGSKPEADQ

SEQ ID NO: 11363 - protein, 284 aa, Leuconostoc mesenteroides subsp. mesenteroides ATCC 8293
MAQIIQWFPGHMAKAFRLMRENLKLVDVVFELVDSRIPESSRNPEVDKLIGNKPRLLIMTKADLADPDQTRAWKKHFEAQGYTVLVLDTRDPRTPQLVTKAARRAVEAKKAAQLAKGIQDQPIRAMISGVPNVGKSTLLNHLVMKNVAPTADRPGVTKKIAWLKTPTKLELLDSPGVLWPKFEDQNIGMKLALTGAVKDTIFAKDDAALFLINFFREYRPEAIIERYHLNDNIFDQENVDVLLSITSKLGFKDDYDKASERILNDLRKNKLGAFTLDLIETKND

SEQ ID NO: 11364 - protein, 355 aa, Glycine max
  misc_feature (275)..(275): Xaa can be any naturally occurring amino acid
  misc_feature (304)..(304): Xaa can be any naturally occurring amino acid
  misc_feature (313)..(313): Xaa can be any naturally occurring amino acid
  misc_feature (330)..(330): Xaa can be any naturally occurring amino acid
  misc_feature (341)..(341): Xaa can be any naturally occurring amino acid
MFEGLCLKMEKRGNVLMEKYEFGKLLGQGNFAKVYHARDVRTGESVAVKVIDKEKILKIGLVDQTKREISIMRLVKHPNVLQLYEVLATKTKIYFIIEYAKGGELFNKIAKGRLTEDKARKYFQQLVSAVDFCHSRGVYHRDLKPENLLLDENGVLKVADFGLSALVESHRQKDMLHTICGTPAYVAPEVISRRGYDGTKADVWSCGVILFVLLAGHLPFYDLNLMSLYNKIGKADYKCPNWFPFEVRRLLAKILDPNPNTRISMAKVMENSWFXKGFKPKSGQVKREAVNVALVDSDQVFCLXENTSAAVVXGRASIVKPSQFNAFNIXSLSAGLDLSGXFAANVELDDIYIYE

SEQ ID NO: 11365 - protein, 236 aa, Zea mays
  misc_feature (134)..(134): Xaa can be any naturally occurring amino acid
MGRSNRKSPGSSGWIPGTDEAAAGGDDVLALEDAAAPREWTAQVEPGVQITFGTIPTGGNDLKRIRFSREMFNKWEAQRWWGENYDRIVELYNVVMFSGRQQGCSTPVSSVDDSQRDSSYSRGGSTSRGSPITXRRRRRHCRRWQAKNRSPGAPYDPSRATTSSRDEASVSLSNVSDLEATEWIEEDEPGVCLTIRELGDGTRELRRIRFSREIFGEDRAKVWWEQNRERIQAEYL

SEQ ID NO: 11366 - protein, 531 aa, Zea mays
MEAVGVTPAPVAAPEKKKLLDLKDPFPAAANGGAKASPASKWAMKKKLVGGDAGYVLEDVPHLTDYMPQLPTYPNPLQDNPAYSVVKQYFVNPDDTVTQKIVVHKTSARGTHFRRAGPRQRVYFQSDEVNAAIVTCGGLCPGLNTVIRELVCGLYDMYGVSSVVGIEGGYKGFYSKNTVALTPKSVNDIHKRGGTVLGTSRGGHDTAKIVDCLQDRGINQVYIIGGDGTQKGASVIYEEVRRRGLKCSVVGVPKTIDNDIAVIDKSFGFDTAVEEAQRAINAAHVEAESAENGIGVVKLMGRNSGFIAMYATLASRDVDCCLIPESPFYLEGKGGLLEFVERRLKDNGHMVIVVAEGAGQDLIARSMNFVDTQDASGNKLLLDVGLWLSQKIKDHFKKKPSFPITLKYIDPTYMIRAVRSNASDNVYCTLLAHSALHGAMAGYTGFTVAPVNGRHAYIPFYRITEKQNKVVITDRMWARVLCSTNQPCFLSHEDVENMKHDDDEHHHMHNTQLLEGGSSPVSKCNGSAAAV

SEQ ID NO: 11367 - protein, 366 aa, Aspergillus nidulans FGSC A4
MTSQRPTSSSSSLLDIVANLASPKSLLFNAHHTNPPPSLPSQRAPTMDKSQQPSSFQQLEKLGEGTYATVFKGRNRQTGELVALKEIHLDSEEGTPSTAIREISLMKELKHESIVSLYDVIHTENKLMLVFEYMDKDLKKYMDTRGDRGQLDQATIKSFMHQLMSGIAFCHDNRVLHRDLKPQNLLINKKGQLKLGDFGLARAFGIPVNTFSNEVVTLWYRAPDVLLGSRTYNTSIDIWSAGCIMAELYTGRPLFPGTTNEDQLQKIFRLMGTPSERSWPGISQLPEYRANFHVYATQDLGLILPQIDPLGLDLLNRMLQLRPEMRIDAHGALQHPWFHDLPQLQAQLQQQQMAGYGGMMPPQQAY

SEQ ID NO: 11368 - protein, 257 aa, Zea mays
  misc_feature (139)..(139): Xaa can be any naturally occurring amino acid
  misc_feature (210)..(210): Xaa can be any naturally occurring amino acid
  misc_feature (234)..(234): Xaa can be any naturally occurring amino acid
  misc_feature (240)..(240): Xaa can be any naturally occurring amino acid
  misc_feature (249)..(249): Xaa can be any naturally occurring amino acid
GRKPNPSARGGKAAKGEAPGTGSHYLLVLTPTPTNQPPLPAASPAAGGHGCKSPFIIMDDADVDHAVELAHFALFFNQGQCCCAGSRTFVHERVYDEFVEKAKARALKRVVGDPFRKGVEQGPQIDDEQFNKILRYIRXYGVDGGATLVTGGDRLGDKGFYIQPTIFSDVQDGMKIAQEEIFGPVQSILKFKDLNEVIKRANASQYGLAXAGVFTNSLDTANTLTRALRAGTVXWVNCFXDVFDAAIPXGGYKMSGI

SEQ ID NO: 11369 - protein, 225 aa, Glycine max
MLSISATRIFFLRSTTIRLSSSSSSLQFFSNPNRTLFRPFLHTSFKPLPSSFSFRTDHTMATSNAKSVHDFTVKDAKGNDINLGDYKGKVLIIVNVASQCGLTNSNYTELSQLYEKYKQKGLEILAFPCNQFGAQEPGSNEQIQEFVCTRFKAEFPVFDKVDVNGDKAAPLYKYLKSSKGGLLGDGIKWNFAKFLVDKEGNVVDRYAPTTSPLSIEKDLLKLLDA

SEQ ID NO: 11370 - protein, 311 aa, Prochlorococcus marinus str. MIT 9313
MHHRPTLASKPYGGLSWKKVLGLLAMDSPSTTANGWIDEHHQGVRYGLQGRVLVDETSPYQRITVIDSSRYGKGLLLDGCWMTAEHQERHYHESLVHPALCSAAQLERVLVIGGGDGGTARECLRYQDVKHLDMVEIDRRVVELSQKHLPSLGSHAWSDPRLQLNLENGIAWVANATESSYDVILIDGSDPAGPAEGLFNQTFFEHCRRILRPGGVFATQSESPEAFRQVHIDTVRLIRQVFGYADPLYGWVPMYPSGWWSWTFAAIDGPRYRNPLPARAAAISAGCEIWSPRWQQGAFEAIPAFIERELT

SEQ ID NO: 11371 - protein, 138 aa, Candida albicans SC5314
MQCSALRKNGHVVIKNRPCKIVDMSTSKTGKHGHAKVHLVAIDIFTGKKLEDLSPSTHNMEVPNVSRQEFQLLDIDDGYLSLMTADGDTKDDVKVPEGELGDKLQSEFDEGKDLIVTIISAMGEEAAISYKEAPKGSA

SEQ ID NO: 11372 - protein, 283 aa, Streptococcus pneumoniae R6
MATIQWFPGHMSKARRQVQENLKFVDFVTILVDARLPLSSQNPMLTKIVGDKPKLLILNKADLADPAMTKEWRQYFESQGIQTLAINSKEQVTVKVVTDAAKKLMADKIARQKERGIQIETLRTMIIGIPNAGKSTLMNRLAGKKIAVVGNKPGVTKGQQWLKTNKDLEILDTPGILWPKFEDETVALKLALTGAIKDQLLPMDEVTIFGINYFKEHYPEKLAERFKQMKIEEEAPVIIIDMTRALGFRDDYDRFYSLFVKEVRDGKLGNYTLDTLEDLDGND

SEQ ID NO: 11373 - protein, 296 aa, Thermotoga maritima MSB8
MRTLKELERELQPRQHLWYFEYYTGNNVGLFMKMNRVIYSGQSDIQRIDIFENPDLGVVFALDGITMTTEKDEFMYHEMLAHVPMFLHPNPKKVLIIGGGDGGTLREVLKHDSVEKAILCEVDGLVIEAARKYLKQTSCGFDDPRAEIVIANGAEYVRKFKNEFDVIIIDSTDPTAGQGGHLFTEEFYQACYDALKEDGVFSAETEDPFYDIGWFKLAYRRISKVFPITRVYLGFMTTYPSGMWSYTFASKGIDPIKDFDPEKVRKFNKELKYYNEEVHVASFALPNFVKKELGLM

SEQ ID NO: 11374 - protein, 371 aa, Eriobotrya japonica
MGKGGMSDGDHADRCCGEAINGDVQQENMAAWLLGVKNLKIQPYKLPNLGPHDVRVRLKAVGICGSDVHHFKNMRCVDFIVKEPMVIGHECAGIIEEVGSEVEDLVPGDRVALEPGISCKRCNLCKQGRYNLCRKMKFFGSPPNNGCLANQVVHPGDLCFKLPDNVSLEEGAMCEPLSVGIHACRRANVCQETNVLVVGAGPIGLVTLLAARAFGAPRIVIADVNDERLSIAKSLGADEVVKVSTNIEDLAEEVATIQKVLENGVDVSFDCAGFDKTITTALSATRPGGKVCLVGMGQREMTLPLATREIDVIGIFRYQNTWPLCLEFLRSGKIDVKPLITHRFGFSQKEVEEAFETSARGGNAIKVMFNL

SEQ ID NO: 11375 - protein, 365 aa, Aspergillus oryzae
MAEFVRAQIFGTTFEITSRYTELQPVGMGAFGLVCSARDQLTGQPVAVKKIMKPFSTPVLSKRTYRELKLLKHLRHENIISLSDIFISPLEDIYFVTELLGTDLHRLLTSRPLEKQFIQYFLYQILRGLKYVHSAGVVHRDLKPSNILINENCDLKICDFGLARIQDPQMTGYVSTRYYRAPEIMLTWQKYDVEVDIWSAACIFAEMLEGKPLFPGKDHVNQFSIITELLGTPPDDVIETICSENTLRFVKSLPKRERQPLATKFKNADPDAVDLLERMLVFDPKKRIRAGEALAHEYLAPYHDPTDEPVAEEKFDWSFNDADLPVDTWKIMMYSEILDFHNIDQGTEASQVLVEGAGDAQQNFV

SEQ ID NO: 11376 - protein, 220 aa, Porphyromonas gingivalis W83
MKFFIDTANLDQIREANDMGVLDGVTTNPSLMAKEGISGKDNCMRHYLAICEIVDGDVSAEVIATDYEGMIREGEELAALHPQIVVKVPCTAEGIKAIKYFSDKGIRTNCTLIFTVGQALLAAKAGASYVSPFVGRLDDIASDGIKLVENIVAMFGFYRYETEVLAASIRHTQHIIQCLEAGADVATCPLNAIKGLLKHPLTDSGLKAFLEDHRRVNEGK

SEQ ID NO: 11377 - protein, 77 aa, Zea mays
  misc_feature (26)..(26): Xaa can be any naturally occurring amino acid
  misc_feature (37)..(37): Xaa can be any naturally occurring amino acid
  misc_feature (66)..(66): Xaa can be any naturally occurring amino acid
SDRNAFRRNVEYACTAEEVQHHFQVXGTVNRATMLNXQVGQPKRVAHIELVRIGAFQETIHSGRIXLHGRHLKAAPQ

SEQ ID NO: 11378 - protein, 448 aa, Arabidopsis thaliana
MEQKFKTDSMNEDRISDLPDALLLQILSSLPTENAIATSVLSKRWRSLWTMLPKLKFDSNFNPVFDDDNIDPTMFSENVYKTLSLHKAPVLESLHLSFEGRTDCLHVGIWIATAFARGVRKLVLDSFYQEDQTVTLPSVLFSYNDSLEILKLKCAIDLDFPSRVCLKSLRKLYLDQVHFKDEESVCNLLCGCPSLQDLVVHRYSNADVATFTIASPSLQRLTIEDLRQEGGYGNGSYVINAPGLKYLNINGVIDIESCLIDKALELEEAKISNVSGITNENILESLTSAKRLILHLSPLEVKVPTGKIFDQLGCLELLTHEREWWNLLSIMLDSSPKLQILKLTDVYLHDNKTNPDERKWNPPKCAPECLLFHLETFLWIGYEWQRGDEKEVATYILENARRLKKATFSTKRIGREKLEDFEKRREMLNELAIVLWDSNSCHLVFEST

SEQ ID NO: 11379 - protein, 526 aa, Triticum aestivum
MSAIKPPPPDRPPQAARLPSPSSSSSAAAAAKQGGTGSRGLLMGRYELGRVLGKGTFAKVYHARHVQTGESVAIKVLDREKAVRSGLVSHIKREIAVLRRVRHPNIVHLFEVMATKTKIYFVMELLVRGGELFSRVSKGRLKEDIARRYFQHLISAVGFCHTRGVFHRDLKPENLLVDEAGNLKVSDFGLSAVAEPFQPEGLLHTFCGTPAYVAPEVLARRGYEGAKADIWSCGVILFVLMAGYLPFHDQNLMAMYRKVYKGEFRCPRWFSKDLTSLIMRFLDTNPSTRITLPEVMESRWFKKGFRPVKFYIEDDQLYNVIDAENDMLDLGLPDPLPQPLPPPPPSPSPQQVDGDDSGSESDASVVSCPATSSFEERHRLRGPLPRPASLNAFDIISFSRGFNLSGLFEEKGDEVRFISGEPMPDIITKLEEIANVKSFAVRKKDWRVSLEGTREGVKGPLTICAEIFELTPSLVVVEVKKKAGDKEEYDDFCNKELKPGMQHLVHQMVPVPNTPTISELAERPSR

SEQ ID NO: 11380 - protein, 183 aa, Erwinia carotovora subsp. atroseptica SCRI1043
MSTEIYAIPLTTIDGKATTFEAFKGQVALVVNVASKCGLTKQYDALEKLYETYRDKGLVVLGFPSNEFAGQEPGSEEEIQEFCRGTFGVQFPMFSKIEVNGENRHPLYQLLIRQQPEANGTWKSDFFARLVNKGRKPKNPEDILWNFEKFLVDREGRVIERFAPDMSPDHDTIVKAIEAALAK

SEQ ID NO: 11381 - protein, 159 aa, Streptococcus pyogenes M1 GAS
MPNLYDFTVKAQDGSDISLVDYKEKVVLVVNTATKCGLTPQYQALQALYDTYHDKGFEVLDFPCNQFLNQAPGDAEEINHFCSLTYHTTFPRFAKIKVNGKDADPLFTWLKEEKSGPLGKRIEWNFTKFLIDQNGQVIKRYSSKTDPKLIEEDLKALLG

SEQ ID NO: 11382 - protein, 451 aa, Synechococcus elongatus PCC 7942
MPSNTAAMLHVVQAIATTGANLTEMELLQRTNQWIDRRLIVEAASEEQAAAVVEAIAAVPDLELLDSEDRTFALHRGGKISVEPKLPLTSQAQLAMAYTPGVGRVCKAIAANPDRVYELTVKQNMVAIVTDGTAVLGLGNLGPAGALPVMEGKAMLFKAFGDVDAFPICLDTQDTDEIVETMKRIAPVFGGVNLEDIAAPRCFEIEARLKQELDIPVFHDDQHGTAIVTLAALENALKLVKKSLSQVRIVMNGAGAAGLSVASLLREAGATNIIICDSRGILSCDRSDLTPQKQAFAIEAGGSLADALVNADVFIGVSVPGVLTVEMVETMASDRIIFAMANPIPEIQPELIQGRAAVIATGRSDYPNQINNVLAFPGVFRGALDCRAKSLTSSMFLAAARAIAALVPPETLSAEHIVPSAFDSRVAPAVAAAVVEAAQANGLAQTLAVTH

SEQ ID NO: 11383 - protein, 339 aa, Desulfovibrio desulfuricans G20
MNLTEALLHALKERGAKEVYGIPGDFALPYFKIIESTGILPLVTLSHEPAVGFAADASARFRGGLGVAAVTYGAGALNMVNAIAQAYAEKSPVVVISGAPGTHEGGHGLLLHHQAKHLDSQYRMYKEVTCDQAVLDDPATAPETIARVLQSCIEHSRPVYLEIPRDLPAAPCAPVPAFAASGTDADAVDACARDVLQRVQSAALPMMMVGVEVRRYGIEDKVALLAERLGVPVVTSFMGRGLLASASCLEGTYLGMAGDETLSEAVESSDGLLLLGVIMSDTNFGVSGSQLDRRRVMHAEDRQVRVGYHVYHDIPLGALVDRLLALLDDGQEADMALSG

SEQ ID NO: 11384 - protein, 314 aa, Coccidioides posadasii
MASRHTTFRLNTGEDIPAIGFGTWQDENAQEDAVLTALSAGYRHIDTAAVYGTEKAIGRALARSRLSRDELFITSKLWNNKHRPEDVEQAIDQSLKNLEIDYLDLYLMHWPAAFAPGDDMFPKDSQGNSKTVDIDYVDTYKAMEKLVKSGKTKAIGISNFSKGEMERLLESCSIVPAVMQMELHPWLQQNDFVEWLKSKGIHVTQYSSLGNQNEVYSGRERYGRLIEDPALAAIGTKYGKTGAQVALAWGITKGHSVLVKSKTPHRIQQNFESDFELKQEDMKAIENIDKKLRFNDSSADFGYNFFVGLEGKEK

SEQ ID NO: 11385 - protein, 482 aa, Comamonas sp. NCIMB 9872
MNSSLHYNYVGGDWVNGATERHNLNPSDLSDSIGIYVGANEAQTQAAIDAAFDARTAWACWTAEQRADALDRIGTSILASAKELGHLLSREEGKTLAEGIGEAARAGRIFKYFAAEALRCGGDLLPAIRPGVSVEVTREPEGVVGIITPWNFPLAIPAWKIAPALAYGNTVVFKPADLVPGSAWALTEIIHRVGGLPPGVFNLVMGPGSKVGNTLANAPKVRALSFTGSATTGRQVGLACMERGAKVQMEMGGKNPLVVLNDADLQSAASVAIQGSFYSTGQRCTGSSRLIVEAGIHDAFVEAMRQQMSALSIGHALKQGTDIGPVASEDQLQQDLEYIRIGVAEGGRLYCGGSQLERETEGFYLSPALLTETDNSMRINREEIFGPVASVIRVGSYEEALHTANDTVFGLSSGICTTSLKYASDFKRRSAAGMVMVNVPTAGVDYHAPFGGRKGSSYGAREQGAYAREFYTVIKTAYTSAG

SEQ ID NO: 11386 - protein, 364 aa, Escherichia coli K12
MMSKNYHIAVLPGDGIGPEVMTQALKVLDAVRNRFAMRITTSHYDVGGAAIDNHGQPLPPATVEGCEQADAVLFGSVGGPKWEHLPPDQQPERGALLPLRKHFKLFSNLRPAKLYQGLEAFCPLRADIAANGFDILCVRELTGGIYFGQPKGREGSGQYEKAFDTEVYHRFEIERIARIAFESARKRRHKVTSIDKANVLQSSILWREIVNEIATEYPDVELAHMYIDNATMQLIKDPSQFDVLLCSNLFGDILSDECAMITGSMGMLPSASLNEQGFGLYEPAGGSAPDIAGKNIANPIAQILSLALLLRYSLDADDAACAIERAINRALEEGIRTGDLARGAAAVSTDEMGDIIARYVAEGV

SEQ ID NO: 11387 - protein, 363 aa, Buchnera aphidicola (Pemphigus spyrothecae)
MTKIYNLAILPGDGIGPELLQKDLNFKVLKEQYKLKINTTEYDIGGIAIDKYGKALPKETLDGCKESDSILFGSVGGPKWQHLPPDQQPERAALLPIRKYFNLFSNLRPAKLYSTLNHLSPLRRDISEKGFDILCVRELTGGIYFGKPKGYIKNIIDKKAFDTEIYYASEIKRIAHIGFKLAQNRKYKITSVDKANVLESSVLWRETVNTISKEYPDVKLSHLYIDHAAMQIIKNPDKFDVILTSNLFGDILSDECAMITGSIGMLPSASLNDSNFGLYEPAGGSAPDIAGKNIANPIAQILSIAMLVRYTMKLPMISDHIESAVIDTLKKGYRTLDIANDKEKYVSTNDIGDIISDILKKRI

SEQ ID NO: 11388 - protein, 140 aa, Brassica napus
  misc_feature (30)..(31): Xaa can be any naturally occurring amino acid
  misc_feature (46)..(46): Xaa can be any naturally occurring amino acid
MSLPLTKEKAAFSPSDPAMQRHVASGRPSXXDGSDFSYRMVVESRXQRVAEGRSRLARLILVQALHLVAGGLLLLLSLSKGAAVNKFAVLSMAAGFLAIVVGELGRLRIMAVLLRLYTSLSSIAVAFSVTCIIRSELFLK

SEQ ID NO: 11389 - protein, 496 aa, Avicennia marina
MPTRQLFIDGEWREPVQRKRIPIINPANEQTIGDIPAATAEEMDIAVEAARKAFFRNSGKDWSSTTGAHRAKYLRAIAAKIKDRKVELVELEAIDSGKPLEEASLDMDNVIGCFEYFAGIAERLDSEQRTPVSLPMETFKCHLLKEPIGVVGLISPWNYPLLMAIWKVAPALASGCTAILKPSELASVTCLELAEVCMEVGLPPGVLNILTGLGPEAGAPLVTHPHVAKISFTGSDTTGVKIMTAAAQLVKPVTLELGGKSPIVVFEDVDLDTAAEWTLFGCFWTNGQICSATSRLLVHESIATTFLEKLVKWCEKIKISDPLEEGCRLGPIVSRRQYEKVMKYISTAKEEGATILCGGARPEHLEKGYFVQPTIITDVKTSMQIWIEEVFGPVLCVKTFATEDEAVELANDTHYGLAAAVISKDLDRCERMAKAFQVGAVWVNCSQPCFYQAPWGGKKRSGFGRELGERGLDIYLNVKQVTRYVSSEPWGWYKSP

SEQ ID NO: 11390 - protein, 165 aa, Staphylococcus aureus subsp. aureus COL
MNNRNVYDIEVSDYKGLTYKLEAFRGKVILVVNTATECIYSEQLKKLETLFQKYKDRGFVVLSFPNNNFDNRQPGSNEEILKISREKFGVTFPVLAKISVNGNDEHPLFTHLKNEQPGIFGSPIKWNFTKFIIDRQGNVVNRFLPMEDPLDISTNIEILLQESSS

SEQ ID NO: 11391 - protein, 246 aa, Brassica napus
MNIAHTIFGVFGNATALFLFLAPSITFKRIIKNKSTEQFSGIPYPMTLLNCLLSAWYGLPFVSKDNTLVSTINGTGALIERVYVLIFLFYAPKKEKAKIFGVFTAVLAVFATVALVSLFALHGNARKLFCGIAATVFSIIMYASPLSIMRLVIKTKSVEYMPFFLSLFVFLCGTSWFIYGLIGRDPFVAIPNGFGCALGTLQLILYIIYCGNKGEKSAEKDDKSLEMKGEEKKQNVVNGKQQEQQV

SEQ ID NO: 11392 - protein, 176 aa, Triticum aestivum
DAWARSVLHSTPHPTPARAGAMVALASLSSLCLCGAARRRSASAPTSISCCMLATPSGRGSHESRIPRRRFRRTEGATKSMEDSVKRKMEQFYEGVDGPPLRVLPIGGLGEIGMNCMLVGNCDRYILIDAGVMFPDYDEFGVQKIIPDTTFIKKWSHKIEAVIITHGHEDHILGYP

SEQ ID NO: 11393 - protein, 393 aa, Pseudomonas aeruginosa UCBPP-PA14
MLSNAQRALIKATVPLLETGGEALITHFYRTMLGEYPEVRPLFNQAHQASGDQPRALANGVLMYARHIDQLQELGPLVAKVVNKHVSLQVLPEHYPIVGTCLLRAIREVLGEQIATDEVLEAWGAAYQQLADLLIEAEESVYAASAQADGGWRGVRRFHVARKQAESEEITSFYLEPVDGQPLLAFQPGQYIGLRLDIDGEEVRRNYSLSAASNGREYRISVKREAGGRVSNHLHDRVAEGDELDLFPPAGDFVLRDSDKPLVLITAGVGITPALAMLQEALPQARPIRFIHCARHGGVHAFRDWIEDVSAQHEQVEHFFCYSEPRVGDSPDAEGVLSREKLADWLPQERDLDAYFLGPRPFMAQVKRHLADLGVPSQQCHYEFFGPAAALDA

SEQ ID NO: 11394 - protein, 102 aa, Glycine max
  misc_feature (49)..(49): Xaa can be any naturally occurring amino acid
MEPMDIVGKAKEDASLPKATMTKIIKEMLPPDVRVARDAQDLLIECCVXQDSLKGAKWSNRAEMTEEEALAEQQRMFAEARARMNGGAIPSKQPDAHQSLES

SEQ ID NO: 11395 - protein, 296 aa, Saccharomyces cerevisiae
MITTPLVHVASVEKGRSYEDFQKVYNAIALKLREDDEYDNYIGYGPVLVRLAWLISGTWDKHDNTGGSYGGTYRFKKEFNDPSNAGLQNGFKFLEPIHKEFPWISSGDLFSLGGVTAVQEMQGPKIPWRCGRVDTPEDTTPDNGRLPDADKDAGYVRTFFQRLNMNDREVVALMGAHALGKTHLKNSGYEGPWGAANNVFTNEFYLNLLNEDWKLEKNDANNEQWDSKSGYMMLPTDYSLIQDPKYLSIVKEYANDQDKFFKDFSKAFEKLLENGITFPKDAPSPFIFKTLEEQGL

SEQ ID NO: 11396 - protein, 447 aa, Ehrlichia canis str. Jake
MYKQSWKLLGRGQDADFTVAYINARIIDPESKLDIIGSLLTKGDKIVDFGQDLFNNGIPSTIDEVVDCNNNILMPGLIDIHVHFREPGQEHKETIHTGSKSAAAGGVTTVVCQPNTIPTISSIITAKYIKMRALESAYVNIEFYASITKPDNSLSDMALLKEAGAVGFTDDGMPVMNSLTMRQALSYSSMLDTVVAQHAEDLNLSNNGHINEGTVSYELGLKGIPDISESIIVNRDIALMKNIKNVHYHILHVSSQDSLNIIKQAKNQGLKVTCEVTPHHLTLTEQDVITHGTLAKINPPLRTENDRLSMVEGLKNGIIDCIATDHAPHEVNTKELPLDTAAFGIVGLETMLPISLELYHNGTISLIDLLATLTYKPANIIKVPRGRIKKGFVADLIILDLNHEWTIDILKFASKSKNSPFHNRKVKGKVLRTIVSGKTTYTAVRNI

SEQ ID NO: 11397 - protein, 288 aa, Pediococcus pentosaceus ATCC 25745
MNVFEESYKLSNGVKIPKLALGTWEIDDDQVADAVRSAIEMGYRHIDTAQAYANERGVGEGVRTASVPREEIFVNSKIAAEIKNYDDAKKSIDETLNKMGLDYLDMMIIHNPQPWAEVNQSDDRHFEGNLEVWRALEDAMHEGKLRAIGVSSFQKEDLDNLIKNSDTKPMVNQILSHIAATPMDLINYSHENGIVVEAFSPIAHGQALRSEAIQKMAAKYNVSAPQLSIRYDWQLDTVVLPKTSNPEHMKSNAELDFVISDEDMEILKQVKPLDYGDASVFPVFGGKM

SEQ ID NO: 11398 - protein, 388 aa, Arabidopsis thaliana
MDRISGLPDELLVKIISFVPTKVAVSTSILSKRWESLWKWVPKLECDCTEPALRDFILKNLPLQARIIESLYLRFRRESFLFQDIKLWGGIAISHCLRELRIDFFSHYANPYVILPRSLYTCKSLVTLKLLGLGIRVDVPRDVCLPSLKTLLLQCVAYSEEDPLRLLLSCCPVLEDLVIELDDANQNVKALVVIVPTLQCLSLKIPASCSDERYLIVTPSLKYFKVEDDREIFNALIENMPELEEADIYVTQHIETLLESVTSVKRLTLRQLYNSIDEYKCRAGIVFKQLEQLELSICSDNWTKLVIWLLQNSPNLRVLNLDADSDYERYEEYEQDNWKNIQRSVPKCLKSSLKTLEFAGYTARPEERDFLSFIFKKARCLKTSSISH

SEQ ID NO: 11399 - protein, 473 aa, Ralstonia eutropha JMP134
MKTLDRFYIQGEWVTPAAGSTLVDVINPATEAPVARLAMGTTADADRAVAAARDAFGTWSQSTREERIALLERIAEQYRARVPELAEAVRLEMGAPVTLCNAMQAPIGLVHIQNTLEVLRNFAFETTHGKTWLRREPVGVAALITPWNVPLNQIAAKVAPALAAGCTVVLKPSEIAPLDAVIFAEIMHAAGTPLGVFNMIFGDGPSVGAALSSHPDVDMVSITGSTRAGVEVAKNAAPTVKRVAQELGGKSPLVVLDDADMKTAVTTAVAQCMVNTGQVCVAPTRLLVSRTRYDEALAIAAATAGALQVGDPADPATKIGPLSNRAQFEKVQQMIGIGIEEGARVIAGGPGRPDGIERGFYVRPTVFADVHNSMTVAREEIFGPVLCVIPYDSEEDAIAIANDTVYGLAAYVASGDAERARRVAARLRAGTVRVNFAPADLTAPFGGVKRSGNGREFGAEGLVEFLEWKAISL

SEQ ID NO: 11400 - protein, 371 aa, Listeria monocytogenes str. 1/2a F6854
MDYEKALAFIKSNSTLEQEEGTEVIFKQAQETARGNLDPFLLKDLKQHLGGTNDAIKEAPQEIQMPDFSNLEIATAAALQMRATMGSPNIDLSNGVTTEYRVVEGDYGDIPVRIYRHEEATKPVPAFIFYHGGGFVGGTPAVVENFCKGIAEKLPAVVINVDYHLAPEFPAPAAPKDCYRVLEWVVEQSNELGIDASKIGVSGDSAGGTLAAAVSYMDYEAETNYVGFQALLYPALTLVDEDNEKYQWDISKFGASEDTLPLVAPGIIGMNSSGELLRTAYVRDENPAAPIYSPLSAVDKSIYPPTLIVSAEFDALRAFADVFAKELRASGVQTKAIVYQGMCHAFIDKYGIFPQAEDVADEIVQMMKEIF

SEQ ID NO: 11401 - protein, 223 aa, Thermoplasma acidophilum
MKIFLDTANIDEIRTGVNWGIVDGVTTNPTLISKEAVNGKKYGDIIREILKIVDGPVSVEVVSTKYEGMVEEARKIHGLGDNAVVKIPMTEDGLRAIKTLSSEHINTNCTLVFNPIQALLAAKAGATYVSPFVGRLDDIGEDGMQIIDMIRTIFNNYIIKTQILVASIRNPIHVLRSAVIGADVVTVPFNVLKSLMKHPKTDEGLAKFLEDWKKVSPDGKLIL

SEQ ID NO: 11402 - protein, 304 aa, Ustilago maydis 521
MIFAIKQPFVKTVKSNSYFSRYQVKYRRRREGRTDYYARKRLVSQAKNKYNAPKYRLVVRFSNRYVTCQIVHAKIVGDFVLTQASSKELPRYGVKTGLSNWTAAYATGLLVARRALTLLGLADKYEGVTEPDGEMAEVEPLGDDEPRPFKCFLDVGLKRTSTGSRVFGALKGASDGGIFIPHSEKRFPGFDPEAKELDAELLRSYIYGGHVAEYMESLEEEDDERFKKQFSTALEQDIGSEDLEDMWTEAFEKIREDPSFTPSDKSGKDWAAESKKYKATKLTYEQRKAKIADKIAAFKAGAEL

SEQ ID NO: 11403 - protein, 508 aa, Euphorbia characias
MGFARKEYEFLSEIGLSERNLGCYVNGTWKANGPVVTTSNPANNQAIAEVVEGSIEDYEEGMKACSEAAKIWMQVPAPKRGDIVRQIGDALRGKLEHLGRLVSLEMGKILAEGIGEVQEIIDMCDFCVGLSRQLNGSIIPSERPNHAMLEMWNPLGIVGVITAFNFPCAVLGWNACIALVCGNCAVWKGAPTTPLMTIATTKLVAEVLERNNLPLAIFTSFCGGADIGQAIAKDTRIPLVSFTGSSKVGLMVQQTVNQRYGKSLLELSGNNAIIVMDDADIPLAARSILFAAVGTAGQRCTTCRRLILHEKIYDTVLDQLLKSYKQVKIGDPLEKGTLLGPVHTAESRKNFEKGIELIKSQGGKILTGGSVIESEGNYVQPTIVEISSKAEVVKEELFAPVLYVMKFQTLEEAIEINNSVPQGLSSSIFTRRPDVIFKWLGPHGSDCGIVNVNIPTNGAEIGGAFGGEKATGGGREAGSDSWKQYMRASTCTINYGSELPLAQGINFG

SEQ ID NO: 11404 - protein, 271 aa, Oryza sativa (japonica cultivar-group)
MSPPLEPHDYIGLSAAAASPTPSSSSCSSSPNPGGEARGPRLTLRLGLPGSESPEREVVAAGLTLGPLPPTTTKAASKRAFPDSSPRHGASSGSVAAAAACQDKAAPAAAPPAAKAQVVGWPPVRNYRKNTLAASASKGKGEDKGTAEGGPLYVKVSMDGAPYLRKVDLKMYSSYEDLSMALEKMFSCFITGQSGLRKSSNRDRLTNGSKADALQDQEYVLTYEDKDADWMLVGDLPWDLFTTICRKLKIMRGSDAAGIAPRSIEQSGQSR

SEQ ID NO: 11405 - protein, 181 aa, Fagus sylvatica
MASSMISSATVATVSRATPAQATMVAPFTGLKSTAAFPATQKSNNDITSLASNGGRVQCMKVWPPLGLQKFETLSYLPPLSLESLAKQIEYLILKGWIPCLEFELEHPFVYRENNRSPGYYDGRYWVMWKLPMFGCTDATQVLAELQEASKTYPTSHIRIIGFDNKRQVQCISFIAYKPPK

SEQ ID NO: 11406 - protein, 315 aa, Oryza sativa (japonica cultivar-group)
MADHAAAEAAPQSSQEEEEDWKEAEGGDGDVEVADRGGGGGAANGGIPEGRPIRVYADGIYDLFHFGHAKSLEQAKRLFPNTYLLVGCCNDELTHKYKGRTVMTEDERYESLRHCKWVDEVIPDAPWVVTEEFLNKHNIDFVAHDSLPYADASGAGNDVYEFVKKLGKFKETQRTDGISTSDIIMRIVKDYNEYVMRNLARGYTRKDLGVSYVKEKRLRVNMGLKNLRDKVKQHQEKVGEKWNTMAKLQEEWVENADRWVAGFLEKFEEGCHSMGTAIKERIQERLKAQSRDFSLLQYDGEDVDEDEDDDEYVRE

SEQ ID NO: 11407 - protein, 342 aa, Haemophilus influenzae R2866
MKERIKAICLEKPNNVVVKEVPYPEKSDNDVLIQVESMGICGSDIGAYRGTNPLVTYPRILGHEIVGRVIESGIGMPDRVRVGDRVIVDPYVFCGQCYPCSIGRTNCCESLKVIGVHIDGGMQEVIRHPAHLLTKVPDNLPIHQLPLAEPLTIALHALHRTTLKSGEHIVIIGAGAIGLMAALAAVQYGAIPILVDILEQRLEYAKSLGIEHIVNPHKEDDIKRIKEITSGRMAEVVMEASGANISIKNTLHYTSFAGRIALTGWPKTETPLPTNLITFKELNIYGSRTSKGEFEEALDMLATNKINASHIITKCIKFEEIPSFISDLSDHPENYLKINAVF

SEQ ID NO: 11408 - protein, 488 aa, Listeria monocytogenes str. 4b F2365
MSIKETALPKVQTKLFINGKWTDGDNKETKDIVNPANGEVIAKIAQAGPNETKKAIKAAKEAFPDWAKMELADRVKLLHKIADLMEEKADTLAKIMTLEQGKPLKESKGEVLTGAENFRFAAEEARRLYGETIPAPNNHAFIVKKQPIGVVAAITPWNFPGGMVTRKLAPALATGNTIVLKPSGDTPLSALAIFEIFEEAGLPKGVANIVMGSSKEIGETLTDSDDVRKLTFTGSTKVGQTLFKQSAETLKKISLELGGHAPFIVFDDANLDAAVNDLVAAKFRNNGQVCVSPNRIFVAKEIKEKFTKALVAKVEQLKVGNGLDDVNVGPLIREDAIDKIDKQLKNATDKGAKVLTGGGRLTGSDYDKGNFYKPTVLDNVTREMDIFYEETFGPVIPLITFETEDEAIEMANDSEFGLASYFYTKDLARVEKVGAALEYGMVGANEIAISNPETPFGGVKHSGFGRENGHYGMEEYIQVKFINLKYRD

SEQ ID NO: 11409 - protein, 112 aa, Bartonella sp. Bi4298tl
ANEACLKMLQEIGSIKRIPKFIARAKDKNDPFRLIGFGHRVYKNYDPRAKIMQKTCHEVLKELNIQDDPLLDIAIELEKIALNDEYFIEKKLYPNVDFYSGIILKALGFPTE

SEQ ID NO: 11410 - protein, 185 aa, Triticum aestivum
  misc_feature (85)..(85): Xaa can be any naturally occurring amino acid
  misc_feature (87)..(87): Xaa can be any naturally occurring amino acid
  misc_feature (143)..(143): Xaa can be any naturally occurring amino acid
  misc_feature (152)..(152): Xaa can be any naturally occurring amino acid
TTLDCGGGLGIDYDGTRSADSDISVAYGLEEYASSIVQAVRTTCDKAMVSHPVLCTESGQAMVSHHSMIILESLSAIPEPKDDDXDXTPEQLRTKIQHHYSCFQLADVRQQSWDLQEARDSRRYKLAKNSPKDFPATPHIYNXHMNSPSSPXLPDVWGIKWRSRLSCRSMRTYPNDTSTNCDSTA

SEQ ID NO: 11411 - protein, 112 aa, Bartonella sp. Rl5132tl
ANEACLKMLQEIGSIKRNPEFIARAKDKNDPFRLIGFGHRVYKNYDPRAKIMQKTCHKVLKELNIQDDPLLDIAIELEKIALSDEYFIEKKLYPKVDFYSGIILKALGLPTE

SEQ ID NO: 11412 - protein, 296 aa, Gloeobacter violaceus PCC 7421
MESEYSNLIQWYPGHIAKARRQLAEQLKQVDLVLEVLDARIAHSSRHDEIQKLAGERPRLVVLNRADMIPQGMLRSWLKWFAARGEAAYPTNAQNGDGVRAVLKAAQQGAVAVNQRRAGRGMRPRAVRVAVIGFPNVGKSALINRLVGKRAVESAAKPGVTRALRWVRIADVIDLLDSPGILPPRLNDQRAAAKLAICDDIGQAAYTTSRVATLAAELLTPLVPRRLAERFGADPLAVTAEEWLEQVARHKYHGNLDRAAEALLGDFRRGQLGAIALEAPPEEPLVPQAEAECEEG

SEQ ID NO: 11413 - protein, 235 aa, Glycine max
MTGTKRNQITTSPVGSPTSGNISDSYSSKEQDRFLPIANVSRIMKRALPANAKISKEAKETVQECVSEFISFITGEASDKCQREKRKTINGDDLLWAMTTLGFENYVGPLKLYLNNYRETEGEKSSTSMAKQEELHSPTHQHQTNIDGVVEINKLLPHSVAAATKASDFNNTTFSAGGFYSVGPHQVTAPKSFTEMGGLNGYRESSIAQSALSADQIQDASGNRMMPPILRYRVE

SEQ ID NO: 11414 - protein, 223 aa, Cucumis melo
MAAAPSVREENVYVAKLAEQAERYEEMVEFMEKVSASLDKEELTVEERNLLSVAYKNVIGARRASWRIISSIEQKEESRGNDDHVSVIRDYRSKIETELSNICDGILKLLDSRLIPSAASGDSKVFYLKMKGDYHRYLAEFKTGAERKEAAESTLTAYKAAQDIANAELPPTHPIRLGLALNFSVFYYEILNSPDRACSLAKQAFDEAIAELDTLGEESYKDS

SEQ ID NO: 11415 - protein, 112 aa, Bartonella sp. Bi4251tl
ANEACLKMLQEIDSVKRIPKFIARAKDKNDPFRLMGFGHRVYKNYDPRAKIMQQTCHEVLKELNIQDDPLLDIAIELEKIALNDEYFVEKKLYPNVDFYSGITLKALGFPTE

SEQ ID NO: 11416 - protein, 160 aa, Thermoplasma acidophilum DSM 1728
MVFKRKEAGITDYSKRLKLLKSREKRFIVRITGKGVIAQVAEYSDIGDRILFTVTDKTLAKYGVDLRGNNIQVCYLVGYIAGIESEKNGVESAVLDTGRRKFRKGGRIAACLKGFTDAGIEVPHGEDVFPDKKRIDGKHLKSPVKISEIVKNFKKMEEKA

SEQ ID NO: 11417 - protein, 506 aa, Pseudomonas fluorescens PfO-1
MRYAHPGTEGAKVSFKSKYGNYIGGEFVAPVKGQYFTNTSPVNGQPIAEFPRSTAEDIEKALDAAHAAADAWGSTSAQARSLILLKIADRIEQNLETLAIIETWDNGKAIRETLNADIPLAADHFRYFAGCLRAQEGSAAEIDGNTVAYHIHEPLGVVGQIIPWNFPILMAAWKLAPALAAGNCVVLKPAEQTPLGISVLLELIGDLLPPGVLNVVQGFGKEAGEALATSKRIAKIAFTGSTPVGSHIMKCAAENIIPSTVELGGKSPNIFFEDIMQAEPSFIEKAAEGLVLAFFNQGEVCTCPSRALVQESIYPQFMEAVMKKVSQIKRGDPLDTDTMVGAQASEQQFDKILSYLEIAKGEGAELLTGGKVEKLEGSLATGYYIQPTLLKGTNKMRVFQEEIFGPVVSITTFKDEAEALAIANDTEFGLGAGLWTRDINRAYRMGRAIKAGRVWTNCYHLYPAHAAFGGYKKSGVGRETHKMMLDHYQQTKNLLVSYDINPLGFF

SEQ ID NO: 11418 - protein, 433 aa, Ralstonia eutropha JMP134
MTPSDVKATLSFSDGSPSVELPIYKGTVGPDVIDIRKLYGQTGKFTYDPGFMSTASCNSKITYIDGDKGELLYRGYPIEQLAQKCDHLETCYLLLKGELPNAKQKEEFTGHVMNHTMVHEQLQFFLRGFRRDAHPMAVLTGLVGAMSAFYHDAMDIDDPHQREISAIRLIAKMPTMVAMAYKYNIGQPYIYPQNDLSYSGNFLRMLFGTPCAPYTVNPVLERALDRIFILHADHEQNASTSTVRLAGSSGTNPFAAIAAGVACLWGPAHGGANEAALKMLEEIGSVDNIGEFIKQVKDKNSGVRLMGFGHRVYKNYDPRAKLMRETCHEVLNELGLHNDPLFKLAMELEKIALEDEYFVSRKLYPNVDFYSGIVQRALGIPTSLFTCIFALARTPGWISQWEEMITDPEYKIGRPRQLFNGAASRDVPDISKR

SEQ ID NO: 11419 - protein, 411 aa, Anaplasma platys
MKENAVLMCGDKKVSLPMLSGTDGIQLIDITTLYRDHKVLTYDPGFMSTAACSSEITFIDGEKGILRHRGLDIADLIGIKGGFCSVAHLLLYGVLPSDTVFEQFLAAIGAQHALSSDVLGVISSFRRDAHPMAILMACFSTLAAKYHGDNRGNEELAVLAIAQVPSLVAAIYLHRMGLELVSPDPSLSYTGNFVKMMFGALEKTRADAIEEALDAIFIMHADHEQNASTATVRMAGSAGTELFACLAAGTATLWGPAHGGANEAVIRMLESIGSPDKVEEFIGFVKDNNSKVRLMGFGHRVYKSYDPRAKILGQISRSVLDNLGCSDELLGVAEELERCALQDEYFVERKLYPNVDFYSGIVLRAMGVPVEMYTTFFALARTAGWVSQWCELLRGSESLKICRPRQLYAGK

SEQ ID NO: 11420 - protein, 367 aa, Bacillus megaterium
MTKKVAVLPGDGGQSNQRRCCRLKAIGERLRHQFEFTYGLIGGAAIDEAGSSSSRSTIETCNEADAVLLGSVGGPKWDRFPSHLRPEKGLLAIRKELDLYANLRPVTFYDSLADASPLKKEYIEGVDFIIVRELTGGLYFGKPSDRRTEGNKETVVDTLFYKRTEIERIIASIDTAVNRRKKVTSVDKANVLESSRVWREVAEEVAKDYPDVELEHMLVDSAAMQLIRNPKYFDVVVTENMFGDILSDEASMLTGSLGMLPSASLTADGPSLYEPVHGSAPDIAGQNKANPIAAAILSAAMLLRHSFGLEKEAAVIEQAVESVLHAGHRTADLADGNHYLGTDKMVEVITAVIANDSAISSIMTASR

SEQ ID NO: 11421 - protein, 474 aa, Aspergillus nidulans FGSC A4
MASTLRLSTSALRSSTLAGKPVVQSVAFNGLRCYSTGKTKSLKETFADKLPGELEKVKKLRKEHGNKVIGELTLDQAYGGARGVKCLVWEGSVLDSEEGIRFRGLTIPECQKLLPKAPGGEEPLPEGLFWLLLTGEVPSEQQVRDLSAEWAARSDLPKFIEELIDRCPSTLHPMAQFSLAVTALEHESAFAKAYAKGINKKEYWHYTFEDSMDLIAKLPTIAAKIYRNVFKDGKVAPIQKDKDYSYNLANQLGFADNKDFVELMRLYLTIHSDHEGGNVSAHTTHLVGSALSSPMLSLAAGLNGLAGPLHGLANQEVLNWLTEMKKVVGNDLSDQSIKDYLWSTLNAGRVVPGYGHAVLRKTDPRYTSQREFALRKLPDDPMFKLVSQVYKIAPGVLTEHGKTKNPYPNVDAHSGVLLQYYGLTEANYYTVLFGVSRALGVLPQLIIDRAFGAPIERPKSFSTEAYAKLVGAKL

SEQ ID NO: 11422 - protein, 306 aa, Hevea brasiliensis
MPSHGDLDRQIEHLMECKPLPEARGQTLCDQARAILVEEWNVQPVKCPVTVCGDIHGQFYDLIELFRIGGNAPDTNYLFMGDYVDRGYYSVETVTLLVALKVRYRDRITILRGNHESRQITQVYGFYDECLRKYGNANVWKYFTDLFDYLPLTALIESQIFCLHGGLSPSLDTLDNIRALDRIQEVPHEGPMCDLLWSDPDDRCGWGISPRGAGYTFGQDIAAQFNHTNGLTLISRAHQLVMEGYNWCQEKNVVTVFSAPNYCYRCGIMAAILEIGENMAQNFLQFDPAPRQIEPDTTRKTPDYFL

SEQ ID NO: 11423 - protein, 118 aa, Glycine max
MATLDSDVTVFPAGEASSSAGPSSSTKKPKRFEIKKWNAVSLWAWDIVVDNCAICRNHIMDLCIECQANQASATSEECTVAWGVCNHAFHFHCISRWLKTRQVCPLDNSEWEFQKYGH

SEQ ID NO: 11424 - protein, 393 aa, Ralstonia eutropha JMP134
MSAANHTTPADAPQSAGPKPKKSVALSGVTAGNTALCTVGRTGNDLHYRGYDILDVADACEFEEIAHLLVHGKLPNRAELAAYKTKLKSLRGLPANVKAALEWVPASAHPMDVMRTGVSVLGTVLPEKDDHNAPGARDIADRLMASLGSMLLYWYHYSHNGRRIEVETDDDSIGAHFLHLLHGEKPSKLWERAMHTSMILYAEHEFNASTFTGRVIAGTGSDMYSAICGAIGALRGPKHGGANEVAFEIQKRYDSPDEAQADIARRVENKEVVIGFGHPVYTIADPRNQVIKETARNLSKDAGSMKMFDIAERLETVMWDIKKMFPNLDWFSAVSYHMMGVPTAMFTPLFVIARTSGWAAHIIEQRIDNKIIRPSANYTGPEDLKFVPIGKRK

SEQ ID NO: 11425 - protein, 346 aa, Shigella flexneri 2a str. 301
MKSVVNDTDGIVRVAKSVIPEIKHQDEVRVKIASSGLCGSDLPRIFKNGAHYYPITLGHEFSGYIDAVGSGVDDLHPGDAVACVPLLPCFTCPECLKGFYSQCAKYDFIGSRRDGGFAEYIVVKRKNVFALPTDMPIEDGAFIEPITVGLHAFHLAQGCENKNVIIIGAGTIGLLAIQCAVALGAKSVTAIDISSEKLALAKSFGAMQTFNSSEMSAPQMQSVLRELRFNQLILETAGVPQTVELAVEIAGPHAQLALVGTLHQDLHLTSATFGKILRKELTVIGSWMNYSSPWPGQEWETASRLLTERKLSLEPLIAHRGSFESFTQAVRDIARNAMQGKVLLIP

SEQ ID NO: 11426 - protein, 221 aa, Brassica napus
  misc_feature (120)..(120): Xaa can be any naturally occurring amino acid
METLATDPGFIDSGVYLRLGLIVEGKIRLKKPPTLLSRLASSLERSLLLHDESPPEFQHSAVTVFDGRSPPEITISDYLDRIFIYSRCSPSCFVAAYIYILQFLDVTRAHLTPLNVHRLXVTSVMLAAKVFDDRYYNNAYYARVGGVSPRELNRLEMKLLFALDFKLQVDPHTFHAHCCQLEKQNSDGIQIEWPIKEACRLDKETWRKSTPESVCSQTTAR

SEQ ID NO: 11427 - protein, 418 aa, Bordetella parapertussis 12822
MSYQHIKVPTGGQKITVNADYSLNVPDQVIIPVIEGDGTGADITPVMIKVVDAAVQKAYAGKRKIHWMEVYAGEKATKVYGPDVWLPEETLDAVKDYVVSIKGPLTTPVGGGIRSLNVALRQQLDLYVCLRPVRYFKGVPSPVREPEKTDMVIFRENSEDIYAGIEYMAESEQAKDLIQYLQTKLGATKIRFPNTSSIGIKPVSREGTERLVRKALQYAIDNDRASVTLVHKGNIMKFTEGGFRDWGYALAQNEFGAQPIDGGPWCKFKNPKTGREIIVKDSIADAFLQQILLRPAEYDVIATLNLNGDYISDALAAQVGGIGIAPGANLSDSVAMFEATHGTAPKYAGKDYVNPGSEILSAEMMLRHMGWTEAADLIIASMEKSILSKKVTYDFARLLEGATQVSCSGFGQVMIDNM

SEQ ID NO: 11428 - protein, 278 aa, Glycine max
MGVFSEDPNPNPNPIVIREVWASNLESEFELIRELIDRYPFISMDTEFPGVIFRPHVDPTKPFNHRNRPSDHYRLLKSNVDALNLIQVGLTLTDAAGNLPDLAGNRSIWEFNFRDFDVARDAYAPDSIDLLRRQGIDFARNTADGVDSTRFAELMMSSGLVCNDSVSWVTFHSAYDFGYLVKILTRRNLPTRLEEFLKTVKVFFGDNVYDVKHMMRFCDTLYGGLDRVARTLNVERAVGKCHQAGSDSLLTWHAFQKIVDIYFVKDEHRKHAGVLYGL

SEQ ID NO: 11429 - protein, 165 aa, Triticum aestivum
  misc_feature (58)..(58): Xaa can be any naturally occurring amino acid
  misc_feature (72)..(72): Xaa can be any naturally occurring amino acid
  misc_feature (76)..(76): Xaa can be any naturally occurring amino acid
  misc_feature (81)..(81): Xaa can be any naturally occurring amino acid
  misc_feature (100)..(100): Xaa can be any naturally occurring amino acid
  misc_feature (109)..(109): Xaa can be any naturally occurring amino acid
  misc_feature (111)..(111): Xaa can be any naturally occurring amino acid
  misc_feature (123)..(123): Xaa can be any naturally occurring amino acid
  misc_feature (130)..(130): Xaa can be any naturally occurring amino acid
MAPTVMASSATSVAPFQGLKSTAGLPVSRRSNGASLGSVSNGGRIRCMQVWPIEGIKXFETLSYLPPLSTEXLLKXVDYLXRSKWVPCLQFNKVGFIFPXAQPSPGYYXGXYWTIWNCLCSGXTEATQVXTSGRSRRIPDPIPITVSQVILTHPQLKIRKLITSI

SEQ ID NO: 11430 - protein, 101 aa, Glycine max
MSGRVSGKVKWFNDQKGFGFITPDDGSEELFVHQSQIKSDGFRSLAEGESVEFAIESESDGRAKAVDVTGPDGASVQGTRRGGGDRYGGSGGGGGRYGGGA

SEQ ID NO: 11431 - protein, 174 aa, Triticum aestivum
  misc_feature (84)..(84): Xaa can be any naturally occurring amino acid
MPESDNDSGGPSNTGGEGELSSPREQDRFLPIANVSRIMKKALPANAKISKDAKETVQECVSEFISFITGEASDKCQREKRKTXINGDDLLWAMTTLGFEDYVDPLKHYLHKFREIEGERAAATSTSTTPHLPDNNATGYADYGGADVPAPGPGRHEDDGPPHLPLHASAAPSN

SEQ ID NO: 11432 - protein, 116 aa, Brassica napus
MGSTPAEVPCEDVADNRSGVGGGISDVYGEDLATLDQLVTPWVTSVASGYSLMRDPRYNKGLAFTDKERDAHYLTGLLPPVVISQEVQERKLMHNLRQYTVPLQRYMALMDLQEKE

SEQ ID NO: 11433 - protein, 301 aa, Zea mays
MAGLSLEHPWAFAFGLLGNVISFMTFLAPIPTFYRIYKSKSTEGFQSVPYVVALFSAMLWIFYALIKSNETFLITINAAGCVIETIYIVMYFVYAPKKAKLFTAKIMALVNGGVFGVILLLTLLLFKGSKRVVLLGWICVGFSVSVFVAPLSIMRRVIQTKSVEYMPFSLSLSLTLSAVVWFLYGLLIKDKYVALPNVLGFIFGVVQMVLYVLYMNKTPVAAAVGKDAGKLPSAADEHVLVNIAKLNPALPERTSGMHPVTQMAAVPARSCAAEATAPAMLPNRDVVDVFVSRHSPAVHVV

SEQ ID NO: 11434 - protein, 185 aa, Brassica napus
MSCTATDLAVLLGPNATAAADYICGQLGTVNSKFTDVAFAVDNTYLLFSAYLVFSMQLGFAMLCAGSVRAKTTMNIMLTMTNVLDAAAGGLFYYLFGYAFAFGSPSNGFIGKHNFGLKDFPSASADYSNFLYQWAFAIAAAGITSGSIAERTQFVAYLIYSSFLTGFVYPVVSHWFWSVDGWASP

SEQ ID NO: 11435 - protein, 449 aa, Pyrococcus furiosus DSM 3638
MDKRSQKTYKGFYRTLEIQKKFKNQDLSNQILVISMEVVLEGKFLLDKRTIEGYIGIEDGKISKISLREIKGDHKIKVDKGKVILPGLIDVHVHLRDFEESYKESIESGTKAAVHGGITVVFDMPNTKPPIMDEKTLKLREHLFKRKSYADYALGFLLAGNKPVEADFYKIFMGASTGGIYSKNFEEDYIRALDIVSIHAEDYEIIQKYPERPPIAEIRAIERVIEAVKTHKKPAHICHISTAKGLKLLLDSRLEMLSFEVTPHHLFLTRSDYDKNPLLKVYPPLRSEEDRIALWKNIDKVPVIASDHAPHTLEDKEAGAAGLPGLETEVPLLLDAVNKGLITLQDIVEKMHINPIKIFGIENKGFEKGKDADFTIVDMKREWTIRADNLYTKAGWTPYEGWRVKGKVIMTIIRGEVVMEEDEIIGKPRGERIVKKGKHRRNLGSSEEH

SEQ ID NO: 11436 - protein, 194 aa, Zea mays
ILRTNAHRSSGLSNFFVSSNAGVALYIFLIILPFLVLCPLRYYHQKHPVNLLLLGLFTVAISFAVGMTCAFTSGKIILEAAILTAVVVISLTAYTFWAAKRGHDFNFLGPFLFAAIMVLMVFSLIQIFFPLGKISVMIYGGLASLIFCGYIIYDTDNVIKRYTYDEYIWAAVSLYLDVINLFLSLLQLLRAADS

SEQ ID NO: 11437 - protein, 492 aa, Thermobifida fusca
MSISSERIAALRDYVPEVRELTIDGKPVKPAGETWDVYNPATEEVIATVSGATKEQVDEAIRAARTAFDTWSKMSGEERSAAMHSLADRLEARWEELLASIVNEVGTPVSTAEFLQVKMGLGHLRWFADAAKKDRTVHLGPYDVPVPTMSDVDHYPVGVVAAITGYNYPLNLAGFKYGAALAAGCTVVLLPSPRTPLTTLLLGEIIRESDLPDGVINVVLGGADIGQYLSSHPGVDKVSFTGSDAVGAKIMEQAAANLNDVVLELGGKSANIVLPGCDVESFAVDMHMRWSRNSGQGCAALARLLVHEDLFDRFMKAGAEAFPKMKVGDPWDPETHIGPLIRPDHRDRVNGFITEALEQGGKALLQVETPLPEKGWYVNPILLGNLPHSARAVQQEIFGPVAVVLTYKDVDEAIRLANDTAYGLAANVWAPTLEEGRRVAEQLRAGTVWINGGGAMRPDAPFGGSGRSGIGRELGEWGIQEFLEPRHIQWAL

SEQ ID NO: 11438 - protein, 165 aa, Aegilops speltoides
VMASSATTVAPFQGLKSTAGLPVGRRSSGSLGSVSNGGRIRCMQVWPIEGIKKFETLSYLPPLSTEALLKQVDYLIRSKWVPCLEFSKVGFVFREHNSSPGYYDGRYWTMWKLPMFGCTDATQVLSEVEEVKKEYPDAYVRVIGFDNLRQVQCVSFIAFRPPGCE

SEQ ID NO: 11439 - protein, 54 aa, Zea mays
MSTATFVDIIIAILLPPLGVFLRFGCGVEFWICLVLTLLGYIPGIIYAIYVLTK

SEQ ID NO: 11440 - protein, 165 aa, Aegilops sharonensis
VMASSATTVAPFQGLKSTAGLPVSRRSSASLGSVSNGGRIRYMQVWPIEGIKKFETLSYLPPLSTEALLKQVDYLIRSKWVPCLEFSKVGFVFREHNSSPGYYDGRYWTMWKLPMFGCTDATQVLNEVEEVKKEYPDAYVRVIGFDNLRQVQCVSFIAFRPPGCE

SEQ ID NO: 11441 - protein, 164 aa, Aegilops bicornis
VMASSATSVAPFQGLKSTGGLPVSRRSRGSLGSVSNGGRIRCMQVWPIEGIKKFETLSYLPPLSTEALLKQVDYLIRSKWVPCLEFSKVGFVFREHNSSPGYYDSRYWTMWKLPMFGCTDATQVLNEVEEVKKEYPDAYVRVIGFDNLRQVQCVSFIAFRPPGC

SEQ ID NO: 11442 - protein, 196 aa, Triticum aestivum
MPDSDNDSGGPSNADFSSPKEQDRFLPIANVSRIMKKALPANAKISKDAKETVQECVSEFISFITGEASDKCQREKRKTINGDDLLWAMTTLGFEDYMEPLKLYLHKFRELEGEKAGGEAGGYGGMYGGAGAGGSGGGMFMMMGQPMYGSPPAAGYQHPQHHHQMMTGGQGGYGYGDAGAGGGSSSSSGFGRQDRA

SEQ ID NO: 11443 - protein, 352 aa, Enterococcus avium
MSKTMKGVSKQAPGYDQMAFIDLSVPEATDDKVLIKVAYTGICGSDIHTFKGEYKNPTTPVVLGHEFSGQVVEVGANVPKVKVGDRVTSETTFYVCGECDYCKEKQYNLCPHRKGIGTQQNGSMANYVLAREESIHLLPDHLSYEGAAMSEPLACCVHAMYQKSHLELKDTIIIMGPGPIGLYLLQIAKEIGAFVIMTGITKDAHRLALAKKLGADVIVDTMKEDLAKVVNEITDGYGVDKVYDASGAVPAVNASLPLIRKQGQFIQVGLFANKMVDLDTESIIQREIEYIGSRSQNPYDWPIAIHLLAKGAINIDEMITKKYPLTEWREAFDKVMEGNEIKVMIESNPEEF

SEQ ID NO: 11444 - protein, 296 aa, Saccharomyces cerevisiae
MITTPLVHVASVEKGRSYEDFQKVYNAIALKLREDDEYDNYIGYGPVLVKLAWHISGTWDKHDNTGGSYGGTYRFKKEFNDPSNAGLQNGFKFLEPIHKEFPWISSGDLFSLGGVTAVQEMQGPKIPWRCGRVDTPEDTTPDNGRLPDADKDAGYVRTFFQRLNMNDREVVALMGAHALGKTHLKNSGYEGPWGAANNVFTNEFYLNLLNEDWKLEKNDANNEQWDSKSGYMMLPTDYSLIQDPKYLSIVKEYANDQDKFFKDFSKAFEKLLENGITFPKDAPSPFIFKTLEEQGL

SEQ ID NO: 11445 - protein, 188 aa, Zea mays
  misc_feature (159)..(159): Xaa can be any naturally occurring amino acid
  misc_feature (176)..(176): Xaa can be any naturally occurring amino acid
MARRTRFVAIAALLTSFLNVAAGHPRPLSGAGLPGDLFGLGIASRIRTDSNSTAKAATDFGQMVRAAPEAVFHPATPADIAALVRFSATSAAPFPVAPRGQGHSWRGQALAPGGVVVDMGSLGRGPRINVSAVAGAEPFVDAGGEQMWVEVLRATLGPXVLMPRERTEYLRLTVSXTLSNAIIYEKEF

SEQ ID NO: 11446 - protein, 474 aa, Azoarcus sp. EbN1
MQVFDMIINGKPVRAGSTFDVVNPATGEVFARVQAGDASHVDQAVAAARAAFPGWSRTPDAERKRLMHALGAALEAHMPELMELVTKEAGKPLGGLNGVGSGMEVGGAIAWTHVTADLELPVEVIQDNDDARIEVHRKPLGVVGSITPWNWPLMIAIWHVIPALRAGNTVVIKPSGMTPTATIRFVELANAILPPGVLNIVTGESGVGSAIAKHPDINKIVFTGSTPTGKNIMQNAAGNLKRLTLELGGNDAGIVLPDVDPKAIAPKLFGVGFHNNGQTCACLKRLYVHDSIYEKVCAELARIAKETVVGDGLVEGTELGPVQNKAQLDFVQELVEDARAHGARILSGGKARSGGGFFFEPTVIADAKDGMRVVDEEQFGPVLPVIRYSDIEEVIARANNNENGLGGSIWSKDHAKAAELALRLECGTAWVNEHGAVQPDAPFGGVKQSGLGVEFGRYGLEEYTSIQTLKIMKA

SEQ ID NO: 11447 - protein, 136 aa, Brassica napus
RKVTAFLGGIHLCDGRYDTPEHRILHDLDTVFKDDFHNPTYPVGTKAPRQPWHDLHCRLQGPAAYDVLTNFAQPRTKATRWKEFSLRLKGKTHWQDDALIRIGRISWILSPVFKYLKDGTNMVPEDDPIVYVSKED

SEQ ID NO: 11448 - protein, 171 aa, Triticum aestivum
RFKCFPPIRDAANKENLWEALLDGHIDMLSSDHSPSTPDLKLEGERDSVSARGGISSLQFVLPVTWSHGKKYGITLNQLASWWSEKPAELAGQKNKGSILPGYHADIVVWKPEVQFHLDDTHAVYHKHRNISAYIGKELSGKVLSTFVRGNLVFAEGKHAGAACGATILAK

SEQ ID NO: 11449 - protein, 508 aa, Burkholderia cepacia R18194
MNPFDLKQLGLDVEYPYRQQYDNYIGGKWVPPVKGEYFENVSPINGQPFCRIPRSGTDDIELALDAAHAARRKWGKTSVAERANLLLAAADRMEKNLKLLAVAETIDNGKPLRETMAADLPLAVDHFRYFAGCIRAQEGGISEIDDNTVAYHFHEPLGVVGQIIPWNFPLLMAAWKLAPALAAGCCVVMKPAEQTPASVLVLMELIGDLFPAGTINIVNGFGKEAGEALATSKRIAKIAFTGSTPVGKHILRAAADSLIPSTVELGGKSPNIFFADVLDQDDAFLDKALEGLAMFALNQGEVCTCPSRILIQESIYEKFIEKAVARVERIKAGHPLDLQTMIGAQASQQQLDKILSYIDIGRGEGAQCLTGGERTAPAAELGTGYYVKPTMLLGNNKMRVFQEEIFGPVASVMTFKDEQDAIELANDTFYGLGAGVWTRNGTRAYRMGREVEAGRVWTNCYHLYPAHAAFGGYKQSGIGRETHKMALSNYQQTKCLLVSYQAEALGFF

SEQ ID NO: 11450 - protein, 275 aa, Escherichia coli
MANPTVIKLQDGNVMPQLGLGVWQASNEEVITAIQKALEVGYRSIDTAAAYKNEEGVGKALKNASVNREELFITTKLWNDDHKRPREALLDSLKKLQLDYIDLYLMHWPVPAIDHYVEAWKGMIELQKEGLIKSIGVCNFQIHHLQRLIDETGVTPVINQIELHPLMQQRQLHAWNATHKIQTESWSPLAQGGKGVFDQKVIRDLADKYGKTPAQIVIRWHLDSGLVVIPKSVTPSRIAENFDVWDFRLDKDELGEIAKLDQGKRLGPDPDQFGG

SEQ ID NO: 11451 - protein, 298 aa, Thermotoga maritima MSB8
MGSDKIHHHHHHMQVPKVTLNNGVEMPILGYGVFQIPPEKTEECVYEAIKVGYRLIDTAASYMNEEGVGRAIKRAIDEGIVRREELFVTTKLWVSDVGYESTKKAFEKSLKKLQLEYIDLYLIHQPFGDVHCAWKAMEEMYKDGLVRAIGVSNFYPDRLMDLMVHHEIVPAVNQIEIHPFYQRQEEIEFMRNYNIQPEAWGPFAEGRKNIFQNGVLRSIAEKYGKTVAQVILRWLTQKGIVAIPKTVRRERMKENISIFDFELTQEDMEKIATLDEGQSAFFSHRDPEVVKWICSLKR

SEQ ID NO: 11452 - protein, 452 aa, Staphylococcus aureus subsp. aureus MRSA252
MNYTQQLKQKDSEYVWHPFTQMGVYSKEEAIIIEKGKGSYLYDTNGNKYLDGYASLWVNVHGHNNKYLNKVIKKQLNKIAHSTLLGSSNIPSIELAEKLIEITPSNLRKVFYSDTGSASVEIAIKMAYQYWKNIDREKYAKKNKFITLNHGYHGDTIGAVSVGGIKTFHKIFKDLIFENIQVESPSFYRSNYDTENEMMTAILTNIEQILIERNDEIAGFILEPLIQGATGLFVHPKGFLKEVEKLCKKYDVLLICDEVAVGFGRTGKMFACNHEDVQPDIMCLGKAITGGYLPLAATLTSQKIYNAFLSDSHGVNTFFHGHTYTGNQIVCTVALENIRLYEKCKLLSQIETTSSTLEKQLHALKRHRNVGDVRGRGLMFGVELVTDKDSKTPLEIEKVERIVRNCKENGLMIRNLENVITFVPVLSMSNKEVKTMVRIFKKAVHNILDRKC

SEQ ID NO: 11453 - protein, 364 aa, Zea mays
MGSTAGDVAAVVDEEACMYAMQLASSSILPMTLKNAIELGLLEVLQKEAGGGKAALAPEEVVARMPAAPSDPAAAAAMVDRMLRLLASYDVVRCQMEDRDGRYERRYSAAPVCKWLTPNEDGVSMAALALMNQDKVLMESWYYLKDAVLDGGIPFNKAYGMTAFEYHGTDPRFNRVFNEGMKNHSVIITKKLLDFYTGFEGVSTLVDVGGGVGATLHAITSRHPHISGVNFDLPHVISEAPPFPGVRHVGGDMFASVPAGDAILMKWILHDWSDAHCATLLKNCYDALPENGKVIVVECVLPVNTEATPKAQGVFHVDMIMLAHNPGGKERYEREFRELAKGAGFSGFKATYIYANAWAIEFIK

SEQ ID NO: 11454 - protein, 53 aa, Glycine max
HWDLPRTREGFYRFKGSETASGVRGCAFSAHADVIWMETAPPNVDECTSYARG

SEQ ID NO: 11455 - protein, 159 aa, Triticum aestivum
  misc_feature (72)..(72): Xaa can be any naturally occurring amino acid
  misc_feature (89)..(89): Xaa can be any naturally occurring amino acid
  misc_feature (100)..(100): Xaa can be any naturally occurring amino acid
  misc_feature (128)..(128): Xaa can be any naturally occurring amino acid
  misc_feature (138)..(138): Xaa can be any naturally occurring amino acid
MAPTVMASSATSVAPFQGLKSTAGLPVSRRSNGASLGSVSNGGRIRCMQVWPIEGIKNSETLSYLPPLSTEXLLKQVDYLIPSKWVLAXRFSKVGSSSRXAQPSPGYYDGRYWTCWNCYVPGALTHTXINEVEESRRXPDPIPHRFHKSQVHAHSPSTT

SEQ ID NO: 11456 - protein, 284 aa, Triticum aestivum
AAAAIAGAFLRLAGRPAVLPSNNLSYSENFLYMLDSLGDKEYKPNPRLARVLDILFILHAEHEMNCSTAAVRHLASSGVDVFTALSGAVGALYGPLHGGANEAVLKMLNEMGAVENIPDFIEGVKNRKRKMSGFGHRVYKNYDPRAKVIRKLAEEVFSIVGRDPLIEVAVALEKAALSDEYFIKRKLYPNVDFYSGLIYRAMGFPTEFFPVLFAIPRMAGWLAHWKESLDDPDNKIMRPQQVYTGVWLRHYTPVRERVASNQGEELGQIATSNATRRRRAGSSL

SEQ ID NO: 11457 - protein, 427 aa, Haemophilus somnus 2336
MSKLTAKLTLSDGREFDLNVQQGTLGYDAVDVQPLVKNKLFTFDPGFMSTASCVSEITYIDGDNGILLHRGYPIADLAKNADYLEVAHLLLFGERPNKEEYANFIKLVKNHTLVHEQISRFFHGFRRDSHPMAIMCGVSGALAAFYHDSLDINDIEHRELTAIRLLAKMPTLAAMCYKYSIGQPFMFPLNKLSYAGNFLYMMFATPCEPYEVNPVLEKAMDRIFILHADHEQNASTSTVRTAASSGANPFACIAAGIASLWGPAHGGANEACINMLEEIGSVDRIPEYIARAKDKNDPFRLMGFGHRVYKNYDPRAKVMRQTCHEVLKELNIQTPLFDVAMELERIALNDPYFIDHKLYPNVDFYSGIILKAIGIPTSMFTVIFALARTVGWIAHWKEMFKPGNMKIVRPRQLYKGHTERKFDAIEK

SEQ ID NO: 11458 - protein, 150 aa, Chlamydophila caviae GPIC
MQLLSPAFDYGKPIPRKYTCQGVNISPPLIFKDIPAEAKSIALIVEDPDVPQNLRADGLWIHWLVYNLSPTITELVEGANIFAVQGLNTSGKACYEGPCPPDRQHRYFFYCYALDTILPSEENVTKDQLLEVMESHVIDNAELMGTYEKS

SEQ ID NO: 11459 - protein, 373 aa, Methanocaldococcus jannaschii DSM 2661
MMVRVMRYKKVPVKKIVNKIIDECDVILLVLDARDPEMTRNRELEKKIKAKGKKLIYVLNKADLVPKDILEKWKEVFGENTVFVSAKRRLGTKILREMIKQSLKEMGKKEGKVGIVGYPNVGKSSIINALTGKRKALTGSVAGLTKGEQWVRLTKNIKLMDTPGVLEMRDEDDLVISGALRLEKVENPIPPALKILSRINNFDNSIIKEYFGVDYEEVDEELLKKIGNKRSYLTKGGEVDLVRTAKTIIKEYQDGKLNYYKVDLKKYGQDRERDISFITKYLKDFPFIEDAKMIVTHLKDFDGLYKKIKKPVLGSEEIDGNIVVVSFGEKTKDACRKKVENLCRERNIEVLSKFGDKIGANNIYVAVGKRVKE

SEQ ID NO: 11460 - protein, 400 aa, Pyrococcus furiosus DSM 3638
MSIRLPQEGKVIEVVNGSLKIPNEPIVAYIEGDGIGREVIPAAIKVVDKAVETAYKGKRRIVWWKLLAGKEALQKVGKLLPEETVKGIAEVKVALKGPMETPIGTGHRSINVALRKMFDLYANIRPIKYYGVPTVYPYADKVDLIIFRENTEDVYAGIEWEAYSREAQKLREFLKNEFGIEIREDSGITLKPISKFATQRIVRKAIKWAIEKGRKRVTIMHKGNVMKFTEGAFRNWAFEVAEKEFSEYVSIGKPEEGKILVDDKIADNMLQQIILRPWEYDIIVTPNLNGDYLSDAAAALVGGVGMAAGINVGDYIAIAEPVHGTAPDIAGKGIANPSAAILSAALLLEYLGWVEAAELIRASLRKTIEKGKVTPDLARGEKALSTEEFIQEVIKEIEGE

SEQ ID NO: 11461 - protein, 423 aa, Lolium perenne
AVVCGRRYDVRIRVRSGGHDYEGLSYRSLQPENFAVVDLNQMRAVLVDGKARTAWVDSGAQLGELYYAISKYSRTLAFPAGVCPTIGVGGNLAGGGFGMLLRKYGIAAENVIDVKLVDANGKLHDKKSMGDDHFWAVRGGGGESFGIVVSWQVKLLPVPPTVTIFKIPKSVSEGAVDIINKWQLVAPQLPADLMIRIIAMGPKATFEAMYLGTCKTLTPMMQSKFPELGMNASHCNEMSWIESIPFVHLGHRDSLEGDLLNRNNTFKPFAEYKSDYVYEPFPKSVWEQIFGTWLVKPGAGIMIFDPYGATISATPEAATPFPHRKGVLFNIQYVNYWFAPGAGAAPLSWSKEIYNYMEPYVSKNPRQAYANYRDIDLGRNEVVNGVSTYSSGKVWGQKYFKGNFERLAITKGKVDPTDYFRNE

SEQ ID NO: 11462 - protein, 165 aa, Aegilops tauschii
VMASSATTVAPFQGLKSTAGLPVSRRSSGSLGSVSNGGRIRCMQVWPIEGIKKFETLSYLPPLSTEALLKQVDYLIRSKWVPCLEFSKVGIVFREHNSSPGYYDGRYWTMWKLPMFGCTDATQVLNEVEEVKKEYPDAYVRVIGFDNLRQVQCVSFIAFRPPGCE

SEQ ID NO: 11463 - protein, 218 aa, Triticum aestivum
  misc_feature (44)..(44): Xaa can be any naturally occurring amino acid
MEAETAAKRARENEGAAAADGAGEQAGISAVIPGWFSEISPMWXYQEMITHLPLCSIKDPKKVLVIGGGDGGVLREVSRHSSVEQIDICEIDKMVVDVSKQFFPHLALGFEDPRVSLHIGDGVAFLKNAPEGTYDAVIVDSSDPVGPAQELFEKPFFESVSRALRPGGVVCTQAESIWLHMHIIEDIVTKNQKPKSSRPQTPKEKKPRRRRRPSPPKP

SEQ ID NO: 11464 - protein, 165 aa, Triticum urartu
VMASSATTVAPFQGLKSTAGLPVSRRSSGSLGSVSNGGRIRCMQVWPIEGIKKFETLSYLPPLSTEALLKQVDYLIRSKWVPCLEFSKVGFVFREHYSSPGYYDGRYWTMWKLPMFGCTDATQVLNEVEEVKKEYPDAYVRVIGFDNLRQVQCVSFIAFRPPGCE

SEQ ID NO: 11465 - protein, 454 aa, Desulfitobacterium hafniense DCB-2
MNVFNLVIKNGKVVTADKIIEASLGINNGKIAAIIEAGTEIQAEKVIDAKGNYVFPGAIDTHAHLNDPGYLWREDYAHGTAAAGVGGFTTIIDMPLQNEPAMTDGQILDKKLEVVSPNAYVDFCFWGGLVDYNLNQLKELDEKGCVAFKSFIGPVSPDYVSLTIGQAKEAMEICKEFDGRAGFHCEDYSLIKWEEARAKRKDTNDWQDFLDSRPVIAELIATQNIIDLAKEVGAKVHICHVSHPRVAEIIRQAQNEGVDVTAETCGHYLTFTDQDVVKNGSLFKCAPPLRDAAAVERMWEYVNNGTLSAIASDHSPCELSEKSEEKHGVFGAWGGISGIQNVMQVVFSEGVVKRGYCPTLLARSLSEGPAKAFGIFGKKGAIQVGFDADLVILDPEKEWEITPESLYYVNPISAFVGLKGKGLPVCTLVRGEVVAQDGQLVGQKGHGEYVRKIK

SEQ ID NO: 11466 - protein, 165 aa, Triticum timopheevii subsp. armeniacum
VMASSATTVAPFQGLKSTAGLPVSRRSSGSLGSVSNGGRIRCMQVWPIEGIKKFETLSYLPPLSTEALLKQVDYLIRSKWVPCLEFSKVGFVFREHNSSPGYYDGRYWTMWKLPMFGCTDATQVLNEVEEVKKEYPDAYVRVIGFDNLRQVQCVSFIAFRPPGCE

SEQ ID NO: 11467 - protein, 165 aa, Triticum turgidum subsp. dicoccoides
VMASSATTVAPFQGLKSTAGLPVGRRSSGSLSSVSNGGRIRCMQVWPIEGIKKFETLSYLPPLSTEALLKQVDYLIRSKWVPCLEFSKVGFVFREHNSSPGYYDGRYWTMWKLPMFGCTDATQVLNEVEEVKKEYPDAYVRVIGFDNLRQVQCVSFIAYRPPGCE

SEQ ID NO: 11468 - protein, 333 aa, Zea mays
  misc_feature (225)..(225): Xaa can be any naturally occurring amino acid
MIRAVSSNASDNVYCTLLAHSALHGAMAGYTGFTVAPVNGRHAYIPFYRITLLDLKDPFPAAANSGAKASSASKWATKKKLVGGDAGYVLEDVPHLTDYMPQLPSPILLVCHVGFLTTYPNPLQDNPAYSVVKQYFVNPDDTVTQKIVVHKTSARGTHFRRAGPRQRVYFQSDEVNAAIVTCGGLCPGLNTVIRELVCGLYDMYGVSSVVGIEGGYKGFYSKNTXVALTPKSVNDIHKRGGTVLGTSRGGHDTAKIVDCLQDRGINQEVRRRGLKCSVVGVPKTIDNDIAVIDKSFGFDTAVEEAQRAINAAHVEAESAENGIGVVKLMGPHQ

SEQ ID NO: 11469 - protein, 165 aa, Triticum aestivum
VMASSATTVAPFQGLKSTAGLPVGRRSSGSLSSVSNGGRIRCMQVWPIEGIKKFETLSYLPPLSTEALLKQVDYLIRSKWVPCLEFSKVGFVFREHNSSPGYYDGRYWTMWKLPMFGCTDATQVLIEVEEVKKEYPDAYVRVIGFDNLRQVQCVSFIAFRPPGCE

SEQ ID NO: 11470 - protein, 428 aa, Zea mays
MGRGLGAAPVSPRLASLGAAALALLVAAALPSPAAGVNATAVLSAFPNFADFARLLASTPVASELAGRSSLTLLAVPNANLPQSPSAFVAGAAAGADIADVLRYHVLLEYLSPSDLARLPPSGKLVTTLFQTTGRAPSDFGAVNLTVGPNSTVVVRSPAPSPGSSATVLGAVTAVPYNLSVLAVGGLIVPSGFDLAASESRPPPPVNITRVLTDARGFYVAASMLQASGVASEFEADERGAGITVFVPTDDAFAGLPATDRLQSLPAERKAVVLRFHVLHSYYPLGSLESIVNPVQPTLATEHTEAGHFTLNITRVNGSIAIDTGIVQASITRTVFDQNPVAVFAVSKVLLPKEMFSRGDSGSTAMVPPSVAMAPGDAGTEQTPQTRLSSPPDLHGEDSESSAALATAKGTSWWCVGLMYLHLLLSLV

SEQ ID NO: 11471 - protein, 494 aa, Salmonella typhimurium LT2
MSDVTLLAEVTTFLRQRHGQFIAGERQAGNGTNFSVTNPATGKIIADVVSATPAQAEEAMQSARRAFDVWRKMPTLQRGALLLKLADTLAAHREELAQLESVCSGKTIMLSRGLELDQSVAFLRYFAGWAGKITGETLNVSLPSMGEERYTAFTQRQPIGVVVGIVPWNFSIMIAIWKLAAALVCGCTIVIKPSEYTPLTLLRVAELAKEAGFPDGVINVVNGAGGEIAQQLIAHPDCAKVSFTGSVATGEKVRRSATSSGKRVTLELGGKNAALFLNDLTAQAMVNGILEAGYLNQGQICAAAERFYLPQEKLDTVMTLLRQRLSEIVPGSPLDEKTVMGPLANQVQLEKVLRLIQRAREEGDTIVYGGETLPGEGYFLQPTAVKVRSKNSTLMHEETFGPVCSFIGYQNEKEALSHINDSPFGLAASVWSENISKALRYAEDIDAGMVWVNMHTFLDPAVPFGGMKGSGIGREFGSAFIDDYTELKSVMVRY

SEQ ID NO: 11472 - protein, 576 aa, Brassica napus
MAASFSVPSMIMEEEGRFEAEVAEVQTWWSSERFKLTRRPYTARDVVALRGHLKQGYASNEMAKKLWRTLKSHQVNGTASRTFGALDPVQVTMMAKHLDTIYVSGWQCSSTHTSTNEPGPDLADYPYDTVPNKVEHLFFAQQYHDRKQREARMSMSREERAKTPFVDYLKPIIADGGTGFGGTTATVKLCKLFVERGAAGVHIEDQSSVTKKCGHMAGKVLVAVSEHINRLVAARLQFDVMGTETVLVARTDAVAPTLIQSNIDSRDHQFILGVTNPNLRGKSLSSLLAEGMAVGNNGPALQAIEDQWLSSARLMTFSDAVVEALKRMNLSENEKSRRVTEWLIHARYENCLSNEQGRELAAKLGVTDLFWDWDLPRTREGFYRFQGSVTAAVVRGWAFAQIADLIWMETASPDLNECTQFAEGVKSKTPEVMLAYNLSPSFNWDASGMTDQQMMEFIPRIARLGYCWQFITLAGFHADALVVDTFAKDYARRGMLAYVERIQREERSNGVDTLAHQKWSGANYYDRYLKTVQGGISSTAAMGKGVTEEQFKETWTRPGAAGMGEGTSLVVAKSRM

SEQ ID NO: 11473 - protein, 366 aa, Streptomyces avermitilis MA-4680
MSDFVPGLEGVIAFETEIAEPDKEGGALRYRGVDIEDLVGHVSFGNVWGLLVDGAFNPGLPPAEPFPIPVHSGDIRVDVQSALAMLAPVWGLKPLLDIDAEQARHDLARAAVMALSYVAQSARGQGLPMVPQSEIDKAHSVVERFMIRWRGEPDPKHVAAVDAYWTSAAEHGMNASTFTARVIASTGADVAAALSGAVGAMSGPLHGGAPSRVLGMIEEIERTGDAEAYVKKALDKGERLMGFGHRVYRAEDPRARVLRRTARELGAPRFEIAEALEKAALEELHNRRPDRVLATNVEFWAAIMLDFAEVPAHMFTSMFTCARTAGWSAHILEQKRTGRLVRPSARYVGPGSRGPQEIEGYEDIAR

SEQ ID NO: 11474 - protein, 358 aa, Shigella flexneri 2a str. 301
MKALARFGKAFGGYKMIHVPQPICGPEDVVTEIKAAAICGADMKHYNVDSGSDEFNSIRGHEFAGCIAQVGEKVKDWKVGQRVVSDNSGHVCGVCPACEQGDFLCCTEKVNLGLDNNTWGGGFSKYCLVPGEILKIHRHALWEIPDGVDYEDAAVLDPICNAYKSIAQQSKFLPGQDVVVIGTGPLGLFSVQMARIMGAVNIVVVGLQEDVAVRFPVAKELGATAVVNGSTEDVVARCQQICGKDNLGLVIECSGANIALKQAIEMLRPNGEVVRVGMGFKPLDFSINDITAWNKSIIGHMAYDSTSWRNAIRLLASGAIKVKPMITHRIGLSQWREGFDAMVDKTAIKVIMTYDFDE

SEQ ID NO: 11475 - protein, 341 aa, Shewanella oneidensis MR-1
MKALSKLKAEKGIWLVDAPKPEMGHNDLLIKIKKTAICGTDMHIYNWDEWSQKTIPVPMVVGHEYVGEVVDIGQEVRGFNIGDRVSGEGHITCGHCRNCRAGRTHLCRNTSGVGVNREGSFAEYLVIPAFNAFKIPDDISDDLASIFDPFGNAVHTALSFDLVGEDVLITGAGPIGIMAAAVCRHVGARHVVITDVNEYRLELARKMGATRAVNVAQENLKDVMKELGMTEGFDVGLEMSGVPSAFRAMLDTMNHGGKIAMLGIPGGEMAIDWSKVIFKGLVIKGIYGREMFETWYKMASLIQSGLDISPIITHHYKIDDFQKGFDAMGSGQSGKVILSWD

SEQ ID NO: 11476 - protein, 296 aa, Saccharomyces cerevisiae
MITTPLVHVASVEKGRSYEDFQKVYNAIALKLREDDEYDNYIGYGPVLVLLAWHISGTWDKHDNTGGSYGGTYRFKKEFNDPSNAGLQNGFKFLEPIHKEFPWISSGDLFSLGGVTAVQEMQGPKIPWRCGRVDTPEDTTPDNGRLPDADKDAGYVRTFFQRLNMNDREVVALMGAHALGKTHLKNSGYEGPWGAANNVFTNEFYLNLLNEDWKLEKNDANNEQWDSKSGYMMLPTDYSLIQDPKYLSIVKEYANDQDKFFKDFSKAFEKLLENGITFPKDAPSPFIFKTLEEQGL

SEQ ID NO: 11477 - protein, 364 aa, Neurospora crassa
MSTEAKKTMKAVVFEGPKKVSVQERPIPEVQDPRDIIVKVQMTALCGSELHTYRGREASTPGFIMGHEFTGVAHAVGSSVKTIKVGDKVVAPFTVSCGTCFYCLHGFSSRCASSLLFGSPGLDGGQAEYVRIPLADGTAVVAPPEIEDERALVLMADIFPTGYFGAKNAFKLMHDLNPEEATVVVVGCGPVGLCAVVSALEYKPKHLFAVDCVESRLALAKELGAEPLNFAEVEKGGVGLEGMVKRIKEVTEGRGADAVVEVVGSRPALKTAYELLRPFGVISSIGVQGHYDLPWSGEDGYNKNLRVQMGRCPVRSIFPEALEVMGRNQHKFGFMYDKIMPLAEAVEGYDLFDNMKVQKVIFTP

SEQ ID NO: 11478 - protein, 347 aa, Chloroflexus aurantiacus
MRAARLHEYDEHLNVQLQLEDVPLPKITKPGDVIVRIGAAGLCRTDLHIIEGVWKDIQDPQRTLLPYILGHENAGWVEEVGPGVTSVKVGDPVICHPLRSCGVCLGCRRGEDMYCEHGSFPGLNCDGGFAEYMLTNERALIKLNPNVAPVDVAPLADAGITAYRVAKKAARKLNPGQYCVILGVGGLGHIALQSVRELCGARIIAIDRSEAARQLARNLGAHYVLDGSDTIVQEVKELTHGGAHVVIDFVGELGAEQVSWQMLRQGGTHFVVGYGGAVHVPTVHMIITEIAIEGSLVGNYVELVELMELNAEGRVKLHGQQYRLDQINQAIDDFKNRRIAGRAVIVP

SEQ ID NO: 11479 - protein, 218 aa, Oryza sativa
MEVEEAAYRTVWSEPPKRPAGRTKFRETRHPVYRGVRRRGGRPGAAGRWVCEVRVPGARGSRLWLGTFATAEAAARGHDAAALALRGRAACLNFADFAWRMPPVPASAALAGARGVRDPVAVAVEAFQRQSAAPSSPAETFANDGDEEEANKEVLPVAAAEVFDAGAFELDDGFRFGGMDAGSYYASLAQGLLVEPPAAGAWWEDGELADSDMPLWSY

SEQ ID NO: 11480 - protein, 150 aa, Triticum aestivum
  misc_feature (69)..(69): Xaa can be any naturally occurring amino acid
  misc_feature (86)..(86): Xaa can be any naturally occurring amino acid
  misc_feature (88)..(88): Xaa can be any naturally occurring amino acid
  misc_feature (94)..(94): Xaa can be any naturally occurring amino acid
  misc_feature (112)..(112): Xaa can be any naturally occurring amino acid
  misc_feature (118)..(118): Xaa can be any naturally occurring amino acid
  misc_feature (126)..(126): Xaa can be any naturally occurring amino acid
MAPTVMASSATSVAPFQGLKSTAGLPVSRRSNGASLGSVSNGGRIRCMQVWPIEGIKKFETLSYLPPLXSTEALLKQVDYLIRSKXGXPCLEVXQRVGFIFREHNASPGVLXDGRYWXIWELPMFXVPTQGDSGGKRKKRSPGRSSAINP

SEQ ID NO: 11481 - protein, 353 aa, Rhodobacter sphaeroides 2.4.1
MVRPRLNWAAEPWSDSEELECAMVIPETETCATFAFRAPSGAWFDYQPGQFLTLDLPVPGGRVQRTYTISSSPSRPLSLSVTVKAQPGSIGGRWMLDKLKPGMRIKAYGPAGQFTSLRHRSPKYLFISAGSGITPMMSMTTWAWDSGEMPDIVFVHAARSPAEIIFRRRLEQFARRVPGLQLRFTVKEEDPFSVWTGYRGRLSQIMLGLMAPDYLEREVFCCGPEPFMQAVREMLVSLGYDMDRYHEESFAAPALEELPVDIPEPAAVSELCFAASGVRVACDGTETVLAVARRAGLNIPSGCNFGLCGTCKVQKIEGEVAMVHNGGISDEEIAAGTILACCARPQGRVTLDL

SEQ ID NO: 11482 - protein, 467 aa, Methanococcoides burtonii DSM 6242
MTSRLNRSLFVFRRDMRVDDNSALLAALDMSDVVIPCFILDPRLCDPKGKAFNSNALQFLLESLYDLKGQLEKVNGRLYLFSGLPEGVIGQLLENLEIDAVFVNHDYTPFSIKRDMQIASICTDKGVDMLQFHDCLLHEPGSIRTKKGTPYKVFTQFFREASKRDVAVPSMFSGGSFFTGDCGVDEVDEGSFLKRSLPERNEQIFVHGGRANGLSVLQSLSQFVNYDTERDLPSVKGTTGLSAHNKLGTISIREFYYSVIDELGRGHTLINELYWRDFFTQISFEFPDVFKHAFKKKFDHLSWDNDRIFFDAWCLGKTGFPIVDAGMRELNTTGYMHNRVRMIVASFLVKDLHIDWKRGERYFASKLVDYDPCVNNGNWQWAASTGADSQPYFRIFNPWLQQKKFDKDCKYIKKWIPELEDIEPQRIHKLEKGDMDIPGYPAPIVDHSKEREVALFMFKAASQIMDV

SEQ ID NO: 11483 - protein, 122 aa, Rickettsia rickettsii
MIQMQSILEVADNSGAKKVMCIKVLGGSHHMVAKLGDVIVVSVKDAIPGGKVKKGDVYKGLIVRTKTGVVRPDGSTIKFDQNALVLLNKQDEPIGTRVFGPVTRELRAKKYVRIMSLAEEVL

SEQ ID NO: 11484 - protein, 483 aa, Prunus avium
MLAQKQAEEAIVSNFSEAHDHEGKEDHHQDKEEENTSLFNVKNFLWHGGSVWDAWFSCASNQVAQVLLTLPYSFSQLGLLSGILLQIFYGIVGSWTAYLISVLYIEYRSRKEKENVNFKNHVIQWFEVLDGLLGPYWKAVGLAFNCTFLLFGSVIQLIACASNIYYINDNLDKRTWTYIFGACCATTVFIPSFHNYRIWSFLGLGMTTYTAWYLTIAAVVHGQKEGVTHTAPTKLVLYFTGATNILYTFGGHAVTVEIMHAMWKPQKFKYIYLFATVYVFTLTIPSATSVYWAFGDELLNHANAFSLLPKNAWRDAAVILMLIHQFITFGFACTPLYFVWEKVIGMHDTKSICLRALARLPVVIPIWFLAIIFPFFGPINSAVGALLVSFTVYIIPSLAHMLTYRKASARQNAAEKPPFFLPSWTAMYVINSFIVVWVLVIGFGFGGWASMTNFVRQVDNFGLFAKCYQCNSPKLPAAAAPHH

SEQ ID NO: 11485 - protein, 260 aa, Triticum aestivum
SARGADIWSCGVILFVLLAGYLPFHDKNLMDMYKKIGKAEFKCPCWFSTDARRLLLRILDPNPSTRISMEKIMENPWFRKGLDAKLLRYNLQSKNAPQVDKNADSDSLSINITAESKQQEEKKPTNMNAFDIISLSTGLDLSGLFEESDNKREYKFTSTNTSSTIVSKIEDVAKNLRLKLTKKDGGLLKMEASKPGRKGVMGIDAEIFEVSPNFHLVEIKKTNGDTLEYQKVLNREMRPALKDIVWAWQGEQSKQQQTMI

SEQ ID NO: 11486 - protein, 165 aa, Triticum aestivum
VMASSATTVAPFQGLKSTAGLPVSRRSSASLGSVSNGGRIRCMQVWPIEGIKKFETLSYLPPLSTEALLKQVDYLIRSKWVPCLEFSKVGFVFREHNSSPGYYDGRYWTMWKLPMFGCTDATQVLNEVEEVKKEYPDAYVRVIGFDNLRQVQCVSFIAFRPPGCE

SEQ ID NO: 11487 - protein, 273 aa, Oryza sativa (japonica cultivar-group)
MAAAVRSVWADNFAAESAILRAVAPCAVYAAINVQYPGCVVSAAGGAGDHRCYYDLTAEERYQVVRANADELKPLQLGLAVRTADGGRFAWEFNLNEFDLAADGDMCEPGSVDYLRHRGMDFNALPWSGVGAASLGRLLWSSGLLAARPSWATFAGAYHVAYFARILMLAVAVAGTGGGGAARRLPADVGGFEEMVRSLLGHHVYDVRLLAGELRGPLADVARQLGAAVPADAAAAGLAGAGALMALQAFEALREQCRGVMPHRGLLCGIQAS

SEQ ID NO: 11488 - protein, 391 aa, Thermosynechococcus elongatus BP-1
MNLLEQLRQMTVVVADTGDILAIQKFTPRDATTNPSLITAAAQMKEYQSIVDETLRQAKADLGSGATSREIVSLAVDRLAVAFGLKILQIIPGRVSTEVDARLSYDTAATVQKARELISQYEAAGVGRDRVLIKIAATWEGIRAAEILEKEGIHCNLTLLFGFHQAVACAEAGVTLISPFVGRILDWYKKKTGRAEYPGPEDPGVISVTKIYNYYKKFGYPTEVMGASFRNIGEIIELAGCDLLTISPALLQELQNTTGELKRKLDPAIAATLDIEKVAMDEATFRKMHAADEMASEKLEEGIKGFTKALETLEDLLRRHLARIEGEATLTHAAEELFHVYDLDGDGIITREEWLGTDAVFDALDANHDGKVTPEDMGAGLGVVLHLAQAK

SEQ ID NO: 11489 - protein, 165 aa, Secale cereale
VMASSATSVAPFQGLKSTAGLPVSRRSSGSLGSVSNGGRIRCMQVWPIEGIKKFETLSYLPPLSTEALLKQVDYLIRSKWVPCLEFSKVGFVFREHNSSPGYYDGRYWTMWKLPMFGCTDATQVLNEVEEVKKEYPDAYVRVIGFDNLRQVQCVSFIAFRPPGCV

SEQ ID NO: 11490 - protein, 400 aa, Exiguobacterium sp. 255-15
MNQTEKIITQTEKFGAHNYHPLPIVISEAEGVFVKDPEGREYMDMLSAYSAVNQGHRHPKIIEALKRQADKITLTSRAFHNDQLGFFYEKVAQLTGKDMVLPMNTGAEAVETAVKAARRWAYEVKQIPGDAEIIVCEGNFHGRTMTAVSMSTEAEYQRGFGPLLPGIKTIPYGDLEALKGAITENTAAFIVEPIQGEAGILIPYEGFLKDAQDVCKEQNVLLVSDEIQSGLGRSGKWFASDWDNVTPDMYILGKALGGGVFPISCVAANHDILSVFNPGSHGSTFGGNPLACAVSVASLEVLEEEKLPERSLELGTYFMNRLKEIDNPMIKEVRGRGLFIGVELTEAARPYCEALKEKGLLCKETHETVIRFAPPLVITKEELDWAFERIEQVLGVSVAQ

SEQ ID NO: 11491 - protein, 164 aa, Bromus catharticus
VMASSATSVAPFQGLKSTAGLPVSRRSTGLGSVSSGGRIRCMQVWPIEGIKKFETLSYLPPLSTEALLKQIDYLIRSKWVPCLEFSKVGFVFREHNASPGYYDGRYWTMWKLPMFGCTDASQVIKELEEVKKEYPDAYVRIIGFDNLRQVQCVSFIAFKPPGCE

SEQ ID NO: 11492 - protein, 165 aa, Brassica napus
MAQDDQSAARSTGTVNWFSDAKGYGFIAPDDGGDELFVHQSSIVSDGFRTLTVDEPVEYAIAVGNDGKTKAVDVTAPGGGSLNKKEMSSRGNGGSCFSCGEVGHMAKDCAGGKRYGGGGRRSGGEGSCYVCGNVGHFARDCRQNAGGNSGGGGGGECYNCGVVGH

SEQ ID NO: 11493 - protein, 225 aa, Commelina communis
MGRGKIEIKKIENPTNRQVTYSKRRAGIMKKAKELTVLCDAQVSIIMFSSTKKFSEFCSPGTNTKQIFDRYQQACQVDLWSAQYERMQNHLKNLKEINDGLRREIRQRMGEDLDGMDIEELRGLEQNLHDSLKTVRERKYHVLQTQTETYKKKVKHSSEAYNNFVRALQMKEDDPVYGYVDDEASHFEGALALANGSSHMYAFRLQPNQPNLHGMEYAPHDLRLA

SEQ ID NO: 11494 - protein, 199 aa, Oceanobacillus iheyensis HTE831
MNKSTNIVWQKTSVKKADRQHLNNHKSAVLWFTGLSGSGKSTLSSALEKELFSLETHTYHLDGDNVRHGLNKNLGFSPEDREENIRRIGEVSKLMVDAGLITLTAFISPYQEDRDHVRATLAQDEFIEIYVKCSLDMCEARDPKGLYKKARLGEINNFTGIDAPYEEPLHPEIVIDTENQSIEESVQTIIHYLKDKQYI

SEQ ID NO: 11495 - protein, 123 aa, Oryza sativa (japonica cultivar-group)
MIQPQTLLNVADNSGARKLMCIRVIGAASNQRYARIGDVIVAVIKDAVPQMPLERSEVIRAVIVRTCKEFKCEDGIIIRYDDNAAVIIDQKGNPKGTRVFGAIAEELRELNFTKIVSLAPEVL

SEQ ID NO: 11496 - protein, 159 aa, Prochlorococcus marinus subsp. marinus str. CCMP1375
MLINVKETVVETADGEKKNLGDYLGNVLLIVNVASLCGNTPQYKGLEKLFEKYKKNGFCVLAFPCNDFAGQEPGTIEEIKEFCSVKYGTTFEIFNKVHAKGLTTEPYTTLNKVEPKGDVSWNFEKFLVGKDGNVIARFEPSVEPSSEELITAIEVALSS

SEQ ID NO: 11497 - protein, 471 aa, Streptomyces coelicolor A3(2)
MATAPSVSYSMTVRLEVPAGGTAVSQLTTAVESAGGSVTGLDVTASGHDKLRIDVTIAAGSTAHADEIVEQLRGIEGVSLGKVSDRTFLMHLGGKIEMQSKHPIRNRDDLSMVYTPGVARVCMAIAENPEDARRLTIKRNSVAVVTDGSAVLGLGNIGPKAALPVMEGKAALFKRFAGIDAWPICLDTQDTDAIVEIVKAIAPGFAGINLEDISAPRCFEIEARLREALDIPVFHDDQHGTAIVVLAALTNALRVVGKGIENVRVVMSGAGAAGTAILKLLLAAGVKNAVVADIHGVVHTGRADLVDAAPESALRWIADNTNPEGLTGTLKEAVHGADVFIGVSAPNVLDGEDVAAMADGAIVFALANPDPEVDPAIARETAAVVATGRSDFPNQINNVLVFPGVFRGLLDAQSRTVNTEMMLAAAHALANVVTEDEINPNYIIPSVFNDKVAGAVAGAVRDAAKAAGVVA

SEQ ID NO: 11498 - protein, 166 aa, Schizosaccharomyces pombe
MSDQDALDTQEKELLEMKERVAEMEAEAAKLRAMQEQLDNETEALRNDKESIDAQSVYVGNVDYSVTPEELQSHFASCGSVNRVTILCDKFTGHPKGFAYIEFSEPSLVPNALLLNGSMLHERPLKVTPKRTNVPGMSRGRGRGRGRGRGRGRGGYRGRARGFAPY

SEQ ID NO: 11499 - protein, 160 aa, Solanum tuberosum
MSDEEHHFESKADAGASKTYPQQAGTIRKNGYIVIKGRPCKVVEVSTSKTGKHGHAKCHFVAIDIFNGKKLEDIVPSSHNCDVPHVNRTDYQLIDISEDGFVSLLTESGNTKDDLRLPTDESLLKQVKDGFQEGKDLVVSVMSAMGEEQINAIKDIGTKN

SEQ ID NO: 11500 - protein, 1413 aa, Aspergillus nidulans FGSC A4
MADLKPPFTEEAARAKVKIAQNLWNAQDPVRVSQAYTPGCIWRNRTSFFSGTEAIVDFLTAKWKRERNYRLRKELFSFTDNRIAVQFWYEFQDANDSMRWKRCYGLEDWTFDRESGKMCKRMMSGNDILLGPDGNGEGRCDYRLLTQRWDHPTYHPYNRNRRLQQLDLNHFCRARISLAMEETSPFPDSKTMRSPLTDASNRINNCHTPTTERRLMREEHALTSPVPMSIVDSPLSPRNNAENNGPPPVGDSRACSKRNSAVSAASIVSAKGKRKTHVGPWQLGRTLGSGATGRVRLAKHAVTGQTAAVKIVSKKCAAISQSDSIAAMDRNAGTFIGAGGRQMPSGIEREVVIMKLIEHPNVISLYDVWENRGELYLVLEYVEGGELFDYVSNHGPLPEEEAVRLFRQIIAGLGYCHRFNICHRDLKPENILLDGEHNIKLADFGMAALQPAGHWLNTSCGSPHYAAPEIIYGRKYRGDKADLWSCGIILFALLTGFLPFDGEDLHATLQLVRKGDYMIPPHVSAEAADLIQRILQKKPDDRISMKDIWKHPLLKKYEKFHQAICNHYLGPPPPLSPQDCGPPVVRQDIDVDLLRNLQTLWHDVKPERLIEKLISLEPTQERLFYHALVKFRNEQLENYEGQPLRYSTSDYHHISRGQARLSKHLRSRSQNGSQRRSRAPSVKETGKRRPSTRELKPSASVETYDPYRSPFNRVPDKSPQYAHVTIHREAPETSPKPAEVEVDSSNPFLDDEQEIECQQSPPFTLVRKRKQNFNSVKSFQSKTSLISSRRALNSASTPRSVSYKRNVTFHHNRNRSQSSASAKAKRAHCNRQPSEASLISGFDDDPFSDSRSSSLLPAQPAVVRGAGIAVKNSVQRRVQHSDFVWRDEARKVSHELSQICEEAFNGSSLSTGCTDTTCVSPETPATSVSLASPGVSNHQMDSSSSTVCLAATPPADSPKTSHVRRELEETRRRLIEHSMKDGSKEIPQCLAPVIDHLDRLIEQEKTRRPGKVSTKEDYSSMSDLFCGSPVEPTQLSVLSEELNTGRRSDDTPSSKKDRQVSGSTAASSQISRGKRSIRMVPHSSYQSISNTEPRAVHRPAAALIDRPENDRGNALASRVGSNHRHNRTPCELDPIDEHPASPRRSAVRSTDHKKWSWFRKSQNIEEDFVKAPTVVKPLHPSSATVIVHEVHPARNTAENQPKLGKPPSDSQKVSFWSFIKRKKGKNADPESTATNPVLESRRDDERQRAHPGPKLSENKTATKPRRSIRSSGISNNWFARVFQFKPATRVVALNASKIKGRKEIYKMLRDWKQYGMEDIYLDKPNSIIYGRVGESNFLHLRPVDFSADFYTVIEDGRQANLSVVRFRQERGAASSFNRVVDTLCMVMKQRGLLVEDPARAKRMAQVLDAFPNA

SEQ ID NO: 11501 - protein, 304 aa, Zea mays
  misc_feature (116)..(116): Xaa can be any naturally occurring amino acid
  misc_feature (143)..(143): Xaa can be any naturally occurring amino acid
  misc_feature (168)..(168): Xaa can be any naturally occurring amino acid
MAGMSLQHPWAFAFGLLGNVISFMTFLAPIPTFYRIYKSKSTEGFQSVPYVVALFSAMLWIFYALIKSNETFLITINAAGCVIETIYVVMYFVYAPKKAKLFTAKIMVLLNGGVFXVILLLTLLLFKGSKRVVLLGWICVGFXPVSVFVAPLSIMRRVIQTKSVEYMXPFSLSLSFTLSAVVWFLYGLLIKDKYVALPNILGFTFGVVQMVLYVLYMNKTPVAATAEGKDAGKLSSAADEHVLVNIAKLSPALPERSSGVHPVTQMAGVPVRSCAAEATAPAMLPNRDVVDVFVTRHSPAVHVA

SEQ ID NO: 11502 - protein, 204 aa, Yarrowia lipolytica
MPQPTDLRRKLVIVGDGACGKTCLLIVFAKGTFPEVYVPTVFENYVADVEIDGRRVELALWDTAGQEDYDRLRPLSYPDANVIIICFAIDSPDSLDNVQEKWISEVLHFCQGVPILLVGCKVDLRNDPKTIEELRRTSQRPVTTEEGNAVAQKIGAGKYLECSARTHDGVREVFEHATRAALTAHGQKGSKSSSREGKKKCLIL

SEQ ID NO: 11503 - protein, 222 aa, Triticum aestivum
  misc_feature (93)..(93): Xaa can be any naturally occurring amino acid
GGIPFNKAYGMTAFEYHGTDSRFNRVFNEGMKNHSVIITKKLLDFYTGFEGVSTLVDVGGGVGATLHAITSRHPHISGVNFDLPHVISEAPAXFPGVRHVGPGTCSPPVPAGDAILMKWILHDWSDAHCATLLKNCYDALPENGKVIVVECVLPVNTEATPKAQGVFHVDMIMLAHNPGGKERYEREFRELAKGAGFSGFKATYIYANAWAIDSSSEPPSPR

SEQ ID NO: 11504 - protein, 347 aa, Bacillus subtilis subsp. subtilis str. 168
MQSGKMKALMKKDGAFGAVLTEVPIPEIDKHEVLIKVKAASICGTDVHIYNWDQWARQRIKTPYVFGHEFSGIVEGVGENVSSVKVGEYVSAETHIVCGECVPCLTGKSHVCTNTAIIGVDTAGCFAEYVKVPADNIWRNPADMDPSIASIQEPLGNAVHTVLESQPAGGTTAVIGCGPIGLMAVAVAKAAGASQVIAIDKNEYRLRLAKQMGATCTVSIEKEDPLKIVSALTSGEGADLVCEMSGHPSAIAQGLAMAANGGRFHILSLPEHPVTIDLTNKVVFKGLTIQGITGRKMFSTWRQVSQLISSNMIDLAPVITHQFPLEEFEKGFELMRSGQCGKVILIP

SEQ ID NO: 11505 - protein, 407 aa, Aethionema grandiflora
YQGVYPVKGNQDRFVVEDIVKFGSPFRFGLEAGSKPEILLAMSCLCKGNPDAFLVCNGFKDAEYISLALLGRKLALNTVIVLEQEEELDLVIDLSQKMNVRPVIGLRAKLRTKHSGHFGSTSGEKGKFGLTTTQIVRVVRKLRQAGMLDCLQLLHFHIGSQIPSTALLSDGVAEAAQLYCELVRLGAHMKVIDIGGGLGIDYDGSKSGESDLSVAYTLEEYADAVVASVRFVCDRKSVKHPVICSESGRAIVSHHSVLIFEAVSAAKPMAHHANPEDIQFLLEGNEEARADYEDLYAAVMRGDHESCLLYVDQLKQRCVEGFKEGVLSIEQLASVDGLCEWVLKAIGASDPVRTYHVNLSVFTSIPDFWGIEQLFPIVPIHKLDQRPGVRGILSDLTCDSDGKINKF

SEQ ID NO: 11506 - protein, 230 aa, Gloeobacter violaceus PCC 7421
MDLDILKQTAARRAVELVEDGMVVGLGTGSTAAFAVSVLAERVRLGLRVVGIPTSERTARQAEAEGIVLGTLAEQSRVDLTIDGADEVALGELALIKGLGGALLREKIVAAASERLIIIVDATKLVEQLGSHGPLPVEVAPFGWQATARALERLGAEVNLRAQHGQAFLTDGGHYILDCRFGPIARPAELEAAIDRIPGVVESGLFVGMASAVIVADEGGIEVLTPSAAP

SEQ ID NO: 11507 - protein, 406 aa, Theobroma cacao
YQGVYPVKSNQDRFVVEDIVKFGSSFRFGLEAGSKPELLLAMSCLCKGNPEALLVCNGFKDAEYISLALLARKLALKHVIVLEQEEEVDMVIDISQKLSVRPVIGVRAKLRTKHSGHFGSTSGEKGKFGLTTTQVLRVVKKLQDSGMLDCLQLLHFHIGSQIPSTALLSDGVGEAAQIYSELVRLGARMKVVDFGGGLGIDYNGSKSGDSDLSVPYGLQEYAHVVNAIRFVCDRKSVKHPVICSESGRAIVSHHSILIFEAICLTAPATHNEPINIPFIMEGLSEDACADYWNLRDTAMRTGDGAFWFYADQWKQRCVEQFKEGTLGIEQLASVDGLCEWVLKAIGASDPVHTYNINLSVFTSIPDLWGIDQLFPIVPIHKLDQRPGARGILSDLTCDSDGKINKF

SEQ ID NO: 11508 - protein, 299 aa, Triticum aestivum
  misc_feature (40)..(40): Xaa can be any naturally occurring amino acid
  misc_feature (113)..(113): Xaa can be any naturally occurring amino acid
  misc_feature (124)..(124): Xaa can be any naturally occurring amino acid
MKTLLILTILAMATTIATANMQVDPSSRVQWPQEQPPPQXQQPFSQQPQQIFPQPQQTFPHQPQQAFPQPQQTFPRRPQQQFPQPQQPQQPFPQPQQPQLPFPQQPQQPFPQXPQQPQQPFPQXSQQPQQPFPQPQQQFPQPQQPQQSFPQQQQWMIQSFLQQQMNPCKNFLLQQCNPVSLVSSLVSIILPRSDCQLMQQQCCQQLAQIPQQLQCAAIHSVVHSIIMQQEQRQGVQIRRPLFQLVQGQGIIQPQQPAQLEVIRSLVLRTLPTMCNVYVSPDCSTINAPFASIVVGIGGQ

SEQ ID NO: 11509 - protein, 408 aa, Carica papaya
YQGVYPVKSNQDRFVVEDIVKFGSSFRFGLEAGSKPELLLAMSCLCKGSPDAFLVCNGFKDAEYISLALFARKLALNTVIVLEQEEEIDLVIDLSQKLSVKPVIGVRAKLRTKHSGHFGSTSGEKGKFGLTTTQILRVVGKLKQAGMLDCLQLLHFHIGSQIPSTALLSDGVGEAAQIYCELTRLGARMQVVDIGGGLGIDYDGSKSGESDLSVAYSLEEYAAAVVRTVAFVCDRKSVKHPVICSESGRAIVSHHSVLIFEAMSVTGPARRNEYPTDLQFFFDGFKDDARAAYLNLAIADARGDYDTCWFYADQLKERCVEDFKEGTLCIEQLAAVDGLCDFVSKVIGASEPVRTYHVNLSIFTSIPDFWSIGQIFPIVPIHRLDERPEVRGTLSDLTCDSDGKIDKF

SEQ ID NO: 11510 - protein, 427 aa, Pirellula sp. 1
MMNSVWRPYCQMKTAPPPMKIVATEGCHLIGQNGECWIDGMASWWSACHGYNHPQVRDAVTEQLHRMPHVMFGGITHEPAERLANRLAELAPDDLNHVFFSDSGSVAVEVAMKMAIGHWRRHDRPGRTRFLAFDNAYHGDTTGAMSLCDPQRSMHARYSGAITQQYHVALPRDATTEAVLERTLAAHSDSIAGVFVEPLVQGAGGMRFHDVITLRRIRDACKRHDVLLIADEIATGFQRTGKMFAVDHTADLQSPVVPDILCLGKALTAGTMSMAVTIARSHVFDSFYSDDPGAALMHGPTFMANPLACSAANASLDLFEGNPYDVEKIETILRERLSVLRDIDNVADVRCFGAIGVVQFRDPPKMQMVQDELVRRGVWLRPFGDCLYTTPPLCINEDALHRICDAMIEATRATMPRSDSPMCNQLR

SEQ ID NO: 11511 - protein, 104 aa, Zea mays
MHGRTAMAVACLLCMTALLLVQDVQSRRLLWTEQEKKQTHGGLVGNHGAADRRSTSLQEPCSGATGGGGTGSADKQGELPCDDDTSKWTELHTDYIYTQDFKHP

SEQ ID NO: 11512 - protein, 245 aa, Zea mays
  misc_feature (28)..(28): Xaa can be any naturally occurring amino acid
MAKNYPTVSAEYSEAVEKARRKLRALIXPLMLRLAWHSAGTFDVSSRTGGPFGTMKHLFYLAHGANAGLDIAVRLLEPIKEEFPILSYADFYQLAGVVAVEVTGGPEIPFHPGREDKPQPPPEGRLPDATKGSDHLRQVFGKQMGLSDQDIVALSGGHTLGRCHKERSGFEGAWTTNPLVFDNSYFKELLSGDKEGLLQLPSDKALLSDPVFRPLVEKYAVDEKAFFDDYKEAHLKLSELGFADA

SEQ ID NO: 11513 - protein, 566 aa, Triticum aestivum
  misc_feature (322)..(322): Xaa can be any naturally occurring amino acid
  misc_feature (342)..(342): Xaa can be any naturally occurring amino acid
  misc_feature (348)..(348): Xaa can be any naturally occurring amino acid
  misc_feature (376)..(376): Xaa can be any naturally occurring amino acid
MAAAAVASNGGAAPVPGRLASVYSEVQTSRIAHALPLPSVLRSHFTLADGPASTAAGSPDEIAKLFPCLYGQPSAAVVPSAEPVETKPLKIGVVLSGGQAPGGHNVICGIFDYLQERAKGSTMYGFKGGPAGVMKGKYVELTTDFVYPYRNQGGFDMICSGRDKIETPEQFQQAEDTVNRLDLDGLVVIGGDDSNTNACLLGEYFRGRNLKTRVIGCPKTIDGDLKCKEVPTSFGFDTACKIYSEMIGNVMTDARSTGKYYHFVRLMGRAASHITLECALQTHPNVALIGEEVAEKREGVGVGAASLAMAHRARSVSRRREXFGGWGVRDDGGVVDGDEGVXRCIGEXGSVLEGIFGEGEGGWLEASRVLGGTARXFDFLPKTIQEQLLLERDPHGNVQVAKIETEKMLIAMVETELEKRRAAGKYSAHFRGQSHFFGYEGRCGLPTNFDSSYCYALGYGAGALLQFGKTGLISSVGNLAAPVEEWTVGGTALTALMDVERRHGKNKPVIKKAMVELDAAPFKKFASLRDEWASKNRYISPGPIQFSGPGSDASNHTLMLELGAEI

SEQ ID NO: 11514 - protein, 182 aa, Spirodela punctata
MGNCFSQSTQTRGSKRNQKPDPLDEPSTRQAQNGGSANAPPQKPPGAVTGVLRQPPAKGSAAVGPVLGRRMEDVRQTYAIGKELGRGQFGVTHLCTDRVTGKQFACKTIAKRKLVNKEDIEDVRREVQIMHHLTGQQNIVELVGAYEDKQSVHLVMELCAGGELFDRIIAKGHYTERAAASL

SEQ ID NO: 11515 - protein, 190 aa, Arabidopsis lyrata subsp. petraea
HFLSFLLIPIMAIVAVELLRMGPEEILNVWNSLQFDLVQVLCSSFFVIFISTVYFMSKPRTIYLVDYSCYKPPVTCRVPFATFMEHSRLNLKDNPKSVEFQMRILERSGLGEETCLPPAIHYIPPTPTMDAARSEAQMVIFTAMDDLFKKTGLKPKDVDILIVNCSLFSPTPSLSAMVINKYKLRSNIKS

SEQ ID NO: 11516 - protein, 81 aa, Zea mays
MTEGTARGGDILIAIILPPLGVFLKFGCKVEFWLCLLLTFLVYLPGIIYAIYVITKDYPASADIPRQGERASRSHSVRNGD

SEQ ID NO: 11517 - protein, 480 aa, Lactobacillus johnsonii NCC 533
MTISNKVMLITYPDSLGKNIKDLDDVLHTDLKGAVGGVHLLPFFPSTGDRGFAPTDYSMVDPQFGDWSDVEKLGEDYYLMFDFMINHISRQSKYYKDFQKNKDQSPYADLFLSWDKFWPKNRPTQKDIDLIYKRKDRAPYQEITFADGSKEKLWNTFGEEQIDLDVRKDVTKQFIKQTLNNLIDHGSDIIRLDAFAYAIKKLDTNDFFVEPEIWDLLKEVQDDISAKGALILPEIHEHYSMPFKIARHGYFIYDFALPMVVLYSLYSGKSQRLASWLKKSPMKQFTTLDTHDGIGVVDARDILTPNEIGYTSNELYKVGANVKKKYSSAEYHNLDIYQINSTFYSALGDDDKKYFMARLLQVFAPGIPQVYYVGMLAGKNDIELLEKTKEGRNINRHYYSREEIHEEVQRPVVSSLINLLRFRNNEAAFDLNGSIEVTTPTENEIHIIRLNQDKTRKAELRANLETLAYKVLVNGREMAF

SEQ ID NO: 11518 - protein, 484 aa, Chloroflexus aurantiacus
MDYPFFHVSHYIDGQFVDGGSRFDILYPATNQVIGSAPEAGADEVDAAVAAASRAFRQWSRMPAAERRLILKRFAQLIRDHEAELAAIETWDVGRPITENRSGYIPRIAANIEFFADFAVTHGSESYPMDNGYINYVLRQPVGVAALIAPWNIPLLQATWKMGPALAFGNTVVLKPAELTPIGTWRLAQLAHAAGVPAGVINVIHGFGPNSAGALLTRHPDVKLISFTGETTTGKIIMATAAPTLKRVSFELGGKGANIIFADADLDRAVAISLRSSFFNQGEFCLAGPRLLVQRPIYEAFLTRFQRATSQLQVGDPFDPQTRVGALISREHYERVTGFIDLARADGAHILTGGTDPVLPEPFAQGNFLQPTIITDVKPHDQVCQDEIFGPVVTVVPFDDEEEAIAIANGVSYGLSAVVQTRDVGRAVRMGSALEAGTIWINDFFVRDLRVPFGGMKQSGIGREGGHYSLEFYTEAKTICLSNQ

SEQ ID NO: 11519 - protein, 143 aa, Zea mays
MAMAYKMATEGMNVKEECQRWFMEMKWKKVHRFVVYKIDERSRAVLVDKVGGPGEGYEELVAALPGDDCRYAVFDFDFVTVDNCQKSKIFFIAWSPAASRIRAKILYATSKQGLRRLLDGVHYEVQATDPSEMGFDVIRGRAQ

SEQ ID NO: 11520 - protein, 259 aa, Zea mays
GSERSWSERRACVAMDGAEDDGTEWMMHGAGGKGKGGGALDKNKKRFSDEQTKSLESMFATQAKLEPRQKLQLARELGLQPRQVAIWFQNKRARWKSKQLEREYSALRDDYHALLCSYESLKDEKRALLKQLEKLAEMLHEPPQAGKYYGGNADDVRSGGVGGTKEEEESTDACAGAALYSSEGAGGGRFIAHFLADDDVGAALFRPPSSPQPTAGLLTSSGPPEHQAPFQFHSDCWPSSSAEHTCSGSQWWKLESLSE

SEQ ID NO: 11521 - protein, 330 aa, Magnaporthe grisea 70-15
MDGKRHLNSFQQLEKLGEGTYATVFKGRNRHTGELVALKEIHLDSEEGTPSTAIREISLMKELKHENIVGLHDVIHTENKLMLVFEHMDGDLKKYMDTKGDRGALQPMVIKSFMYQLLKGIDFCHQNRVLHRDLKPQNLLINNKGALKLGDFGLARAFGIPVNTFSNEVVTLWYRAPDVLLGSRTYNTSIDIWSAGCIMAEMFTGRPLFPGTTNEDQIVRIFRIMGTPSERTWPGFSQFPEYKKTFHTYATQDLRNILPQIDATGIDLLGRMLQLRPEMRISAHDALKHPWFNDILMQQHQQQHAIQAQAQAHQARTQSGSTDTFAGAAV

SEQ ID NO: 11522 - protein, 392 aa, Oryza sativa (japonica cultivar-group)
MADEWWSASQRSHGTSACSAAPSPLTADRVSCGWTSPAAAAAAESTSSITFQDPSRSSAAHHQPLSDAASSLGDPHMVDWTQAFLSGRSDASFQAVLQDDMAASTRPFRAQPTAADEAVMTNPFRDMGVGQGLLLDQASAPLHGLSFDAGEPAVAPATHSITTSFGDYQHSASYDAAAAVMQFSQTPRAPSLPAAAQMQFLSGSYQLPFGGAPPLPSQLLLQAMQPKPSCSSNANTLLAKSNSGSAQQICSSEGRKSVSDSPAAAKRPRIEVPSPLPTFKVRKEKLGDRITALQQLVSPFGKTDTASVLHEAIEYIKFLHEQVASLSSPYLKNGNPLQHFQQKGSESTKDAEQPKPDLRSRGLCLVPVASTYTVASETVPEFWHPTFGGTFR

SEQ ID NO: 11523 - protein, 146 aa, Candida albicans SC5314
MSNLQDLINHDDDEYLPSPSPPQQPEPQHASSSELKTSTTEDLPDSVTQEHILTSFEKIKTHFPAARIKKIMQSDEEIGKVAQATPVIVGRALEIFMANLVEVSLLEAKKQGVKRITASHVKSAIENTEQFDFLVEAVEKYPSLKN

SEQ ID NO: 11524 - protein, 423 aa, Methanocaldococcus jannaschii DSM 2661
MLLKNCRIIKDNKIIEGDILIDENGRIKKIAKDIKVDDEIIDIKNSLVIPGVIDAHVHFRWGEEKKEDFLSGSLAGINGGVCFAIDMPNNKPPITTKELFYKKLEDCKKDSKINVFLNFGVTENNYLGTVEDAKAYKIFMVKSVGDLFIEDYSKLKDILNQNKLFCIHAEHKDVINENLKKYQLNSWIDHCKIRDEKSEVEAVKEVIKNLKIIDRQSNKKPHVHFCHISTKEALYLIKKVRQELKNIKITVEVTPHHIYLNKDMAEELKGFGKFNPPLREKDDNIALIKGIVNKDVDIIASDHAPHLLEDKLKNVKNCPSGIPGIETIVPLTLNLVNKGLISLFDAIRVLSKNPAKIFNINNKIEEGNLANLTIIDLKKEGKINAELFKSKAKFSPFDGWEVKGFPIYTVINGTLYEAYGCKC

SEQ ID NO: 11525 - protein, 408 aa, Polanisia dodecandra
YQGVYPVKGNQDRFVVEDIVKFGSSFRFGLEAGSKPEILLAMSCLCKGNPEAFLVCNGFKDAEYISLALLGRKLALNTVIVLEQEEELDLVIDLSQKMNVRPVIGIRAKLRTKHSGHFGSTSGEKGKFGLNTIQIVRVVRKLCQVGMLDCLQLLHFHIGSQIPSTALLSDGVAEAAQLYCELVRLGAQMRVIDVGGGLGIDYDGSKSGESDLSVAYSLEEYAAAVVAAVQFVCERKSVKHPVICSESGRAIVSHHSVLIFEAVSATGPARHAVTPTDLQLMIEGYSEEARADYQNLYAAVMRGEYESCLLYVDQLKQRCVEGFKEGFLSIEQLAAGDGFCELVLKVIGASDPVRTYHVNLSVFTSIPDFWGIGQLFPIVPIHRLDQRPGVRGILSDLTCDSDGKIEKF

SEQ ID NO: 11526 - protein, 129 aa, Thermoplasma acidophilum
MSWQEAEVRELKVGRYILIDDAPCKIVEITMSKPGKHGEAKGRIVAIGVFDNQKRSVVYPVKHKVKIPIIEKKNAQVLSVQNNEVQLMDSETFETFVLPLDPEIADKIKPGMEVPYWETMGMRKIMLQN

SEQ ID NO: 11527 - protein, 313 aa, Zea mays
MQGGATAKQQARDGDRGAAKTPTTEGKGDAAGAKASADVAKGDAAVAKAAGDDVVVGKGDAGNKAGAGAMHHGLSAVEAKDSQTIVALQSPVTVMRPVRGDLEEHLPKPYLARALVAPDIYHPDGTAADEHGHHHMSVLQQHVAFFDRDDNGIIYPWETYSGCRALGFNMILSLLIALVVNGTMSYATLPGWLPSPLFPIYVHNIHKSKHGSDSGTYDNEGRFMPVNFENLFSKYARTSPDRLTYRELWSMTEGFRDAFDLYGWIAAKLEWTILYVLARDDEGYLSREAMRRVYDGSLFEYVERQRAQHAKMS

SEQ ID NO: 11528 - protein, 469 aa, Methanosarcina mazei Go1
MSKNVQKIEKLLIVICMIFIVLPSPALAVTAEENAEAIEGLQTTLTFLWLLIASGLVFFMHAGFSLVETGLTRSKNTANILMKNFMTVVLGILVYWAVGWGVMYGADAAGLIGTDQFFLAGADNATWNSWFFQMVFAATGATIVSGAMAERTNFKAYLVYCVLMVAVIYPIYGHWVWSGADTALLSGADSPIVKAIGVAHHDFAGSGVVHSIGGYSALAGVLLVGARIGKFRDGKAIPIPGHNLTIAFLGTLILALGWLGFNGGSTLNANDPYMNLVVVNTFLAGAVGAVTTMAITWMKTGKPDPSLTANGLLGGLVAVTAPCGSISNWGAIAIGIIAGIIIYAGVMFNENKLKLDDPVGAIAVHGYCGTWGLISVGLFSIGIGNGILADASYAAAVPGLFYGGGVSLLLIQLVAVLITIVWGFGLSFIIFKILDAVIGLRVSEEEEIMGLDICEHGIRAYPEYLMREE

SEQ ID NO: 11529 - protein, 436 aa, Vibrio parahaemolyticus RIMD 2210633
MTLTRRQQIEALEKDWATNPRWKNVKRTYTAEEVVELRGSMVPANTIAQRGADKLWSLVNGSAKKGYVNCLGALTGGQAVQQAKAGIEAIYLSGWQVAADNNTASTMYPDQSLYPVDSVPSVVKRINNSFRRADQIQWANGKSPEDEGGIDYFLPIVADAEAGFGGVLNAYELMKSMIEAGAAGVHFEDQLASVKKCGHMGGKVLVPTQEAVQKLVAARLAADVSGTTTLVIARTDANAADLLTSDCDPYDKDFIEGERTQEGFYRVRAGIDQAISRGLAYAPYADLIWCETATPCLEEARKFAEAIHAEYPDQLLAYNCSPSFNWEKNLDAETIAKFQQELSDMGYKYQFITLAGIHNMWFNMFELAHAYAQGEGMRHYVEKVQRPEFQAAEKGYTFVAHQQEVGTGYFDRMTNTIQGGNSSVTALTGSTEEDQF

SEQ ID NO: 11530 - protein, 407 aa, Arabis drummondii
YQGVYPVKGNQDRFVVEDIVKFGSSFRFGLEAGSKPEILLAMSCLCKGSPDAFLVCNGFKDAEYISLALLGRKLALNTVIVLEQEEELDLVIELSQKMNVRPVIGLRAKLRTKHSGHFGSTSGEKGKFGLTTTQIVRVVRKLSQSGMLDCLQLLHFHIGSQIPSTSLLSDGVAEAAQLYCELVRLGAHMKVIDIGGGLGIDYDGSKSGESDLSVAYSLEEYAEAVVASVRFVCDRRSVKHPVICSESGRAIVSHHSVLIFEAVSADKPMVHQATPDDIQFLLEGDEEARANYEDLYAAVMRGDHESCLLYVDQLKQRCVEGFKEGVLSIEQLASVDGLCEWVLKAIGASDPVHTYNINLSVFTSIPDLWGIDQLFPIVPIHKLDQRPGTRGILSDLTCDSDGKINKF

SEQ ID NO: 11531 - protein, 422 aa, Aquifex aeolicus VF5
MLKLIVKNGYVIDPSQNLEGEFDILVENGKIKKIDKNILVPEAEIIDAKGLIVCPGFIDIHVHLRDPGQTYKEDIESGSRCAVAGGFTTIVCMPNTNPPIDNTTVVNYILQKSKSVGLCRVLPTGTITKGRKGKEIADFYSLKEAGCVAFTDDGSPVMDSSVMRKALELASQLGVPIMDHCEDDKLAYGVINEGEVSALLGLSSRAPEAEEIQIARDGILAQRTGGHVHIQHVSTKLSLEIIEFFKEKGVKITCEVNPNHLLFTEREVLNSGANARVNPPLRKKEDRLALIEGVKRGIIDCFATDHAPHQTFEKELVEFAMPGIIGLQTALPSALELYRKGIISLKKLIEMFTINPARIIGVDLGTLKLGSPADITIFDPNKEWILNEETNLSKSRNTPLWGKVLKGKVIYTIKDGKMVYKD

SEQ ID NO: 11532 - protein, 477 aa, Deinococcus radiodurans R1
MTATPQASARPERPFATVNPYTGETVKTFPFLESAEIPALIERADQAYREWGQRPVTERAAIMRRAAELMLERTDELASLITLEMGKLLREAKGEVALAASILNYYGEQGPSFLEPKTIPVPQGEAAVLHAPLGVLLGIEPWNYPLYQVVRFAAPNLVVGNTVLLKHSELCPQSALALEQLFHDAGVPQGAYTNLFLRIADIEQVIAHPAVQGVSLTGSERAGASVAELAGRHLKKCVLELGGSDPFIVLDAEDLDTTVKAAATGRLSNTGQACIAAKRLMVVDDLYDEFVSRLGQTFSAFVPGDPADPSTRLGPLSSEQAARDLQAQVQDAIDKGATVVAGGQRPEHPGAFVQPTVLTDVTPDMRAYHEELFGPVAVVYRVRDEDEAVALANASTYGLGGAVFSSDLDRAQRVAERLDTGMVWINHPTSSAADLPFGGVKRSGFGRELSSMGMLEFTNQKLVRAFPTKQKPAQVAG

SEQ ID NO: 11533 - protein, 223 aa, Zea mays
MPDSDNDSGGPSNAGGELSSPREQDRFLPIANVSRIMKKALPANAKISKDAKETVQECVSEFISFITGEASDKCQREKRKTINGDDLLWAMTTLGFEDYVEPLKHYLHKFREIEGERAAASAGASGSQQQQQQGELPRGAANAAGYAGYGAPGSGGMMMMMMGQPMYGGSQPQQQPPQPQPPQQQQQQHQQHHMAMGGRGGFGQQGGGGGSSSSSGLGRQDRA

SEQ ID NO: 11534 - protein, 133 aa, Gloeobacter violaceus PCC 7421
MIQQQSRLSVADNTGARELLCIRVLGSTVGSKGLTKGGGNRRYAFVGDIVVAVVKDAAPNMGVKKSEVVRAVVVRTRQAIRRDNGMVIRFDDNAAVIIDKNGNPRGTRVFGPVARELREKNFTKIISLAPEVL

SEQ ID NO: 11535 - protein, 407 aa, Barbarea vulgaris
YQGVYPVKGNQDRFVVEDIVRFGSPFRFGLEAGSKPEILLAMSCLCKGSPDAFLVCNGFKDAEYISLALLGRKLALNTVIVLEQEEELDLVIDLSQKMNVRPVIGLRAKLRTKHSGHFGSTSGEKGKFGLTTTQIVRVVSKLSQSGMLDRLQLLHFHIGSQIPSTSLLSDGVAEAAQLYCELVRLGAHMKVIDIGGGLGIDYDGSKSGESDLSVAYSLEEYAEAVVASVRFVCDRRSVKHPVICSESGRAIVSHHSVLIFEAVSADKPMVHQATPDDIQFLLEGNEEARANYEDLYAAVMRGDHESCLLYVDQLKQRCVEGFKEGVLSIEQLASVDGLCEWVLKAIGASDPVHTYNINLSVFTSIPDLWGIEQLFPIVPIHKLDQRPGARGILSDLTCDSDGKINKF

SEQ ID NO: 11536 - protein, 425 aa, Staphylococcus epidermidis ATCC 12228
MKLIKNGKILKNGILKDTEILIDGKRIKQISSKINASSSNIEVIDAKGNLIAPGFVDVHVHLREPGGEHKETIESGTKAAARGGFTTVCPMPNTRPVPDTVEHVRELRQRISETAQVRVLPYAAITKRQAGTELVDFEKLALEGVFAFTDDGVGVQTASMMYAAMKQAVKVKKPIVAHCEDNSLIYGGAMHKGKRSEELGIPGIPNIAESVQIARDVLLAEATGCHYHVCHVSTKESVRVIRDAKKAGIHVTAEVTPHHLLLTENDVPGDDSNYKMNPPLRSNEDREALLEGLLDGTIDCIATDHAPHAKEEKAQPMTKAPFGIVGSETAFPLLYTHFVRRGNWSLQQLVDYFTIKPATIFNLNYGKLHKDSYADLTIIDLNTEKEIKSEDFLSKADNTPFIGEKVYGNPTLTMLKGEVVFEEEK

SEQ ID NO: 11537 - protein, 493 aa, Schizosaccharomyces pombe
MAPQFKRPELFGFDKSHAQSFVQGKWISSPNNKTFEVDNPATGEIIGKVADVSVEETKKAISAANEAFKTYKNFTHVQRSQLLERWAELIMENKDDLVKMLTLENGKPLSQAEMEVTTCSGYLKWYAAEAVRTFGDVAPSSLQSQNFLISIKQPVGVSALITPWNFPAAMIARKGGAALAAGCTAIFLPAFRTPYVCLGLVRLAQEAGFPDGVLNVITSSDASAHGKELTTNPIVRKVSFTGSTNVGKILMGQSASTIKKVSMELGGNAPFIVFPDFPIDQAVESFCTIKFNSCGQVCVCPNRVYVHKNVYDEFVSKLTEKVKTIKVGDGFDSSSAVGPLISQDGCKKVSKHIEDAVSKGAKITVGGKEISSSKGYFFEPTVLSGVTQDMLVASEETFGPLASVFKFDDTEEVIEWANDSDVGLAGYVFTNNLSTMIHVAKELEVGLVGANIEMVDEPFISFGGIKQSGFGKEAGRLGVQEFMVVKEINLKTL

SEQ ID NO: 11538 - protein, 212 aa, Arabidopsis lyrata subsp. petraea
VVIDNLTNVWARLYVPMMTTTKSSVSKLLPLIVYFHGGGFCVGSTSWSCYHEFLARLSSRSRCMVMSVDYRLAPENPLPAAYEDGVNAILWLNKARNDNLWTKLCDFGRIFLAGDSAGGNIADQVAARLASTEDLTLKIEGTILIQPFYGGEERTESEKRVGNNKSSVRTLEGSDAWWRLSLPRGADREHPYCKPVKINSSTVIRTLVCVAE

SEQ ID NO: 11539 - protein, 428 aa, Pseudomonas aeruginosa
MADKKAQLIIEGSAPVELPVLSGTMGPDVVDVRGLTATGHFTFDPGFMSTASCESKITYIDGDKGVLLHRGYPIEQLAEKSDYLETCYLLLNGELPTAAQKEQFVGTIKNHTMVHEQLKTFFNGFRRDAHPMAVMCGVIGALSAFYHDSLDITNPKHRQVSAHRLIAKMPTIAAMVYKYSKGEPMMYPRNDLNYAENFLHMMFNTPCETKPISPVLAKAMDRIFILHADHEQNASTSTVRLAGSSGANPFACIASGIAALWGPAHGGANEAVLRMLDEIGDVSNIDKFVEKAKDKNDPFKLMGFGHRVYKNFDPRAKVMKQTCDEVLQELGINDPQLELAMKLEEIARHDPYFVERNLYPNVDFYSGIILKAIGIPTSMFTVIFALARTVGWISHWQEMLSGPYKIGRPRQLYTGHTQRDFTALKDRG

SEQ ID NO: 11540 - protein, 392 aa, Zea mays
  misc_feature (134)..(134): Xaa can be any naturally occurring amino acid
  misc_feature (252)..(252): Xaa can be any naturally occurring amino acid
MEVGDARNGSAAAALTKGSADDAARKPLPPCCVKAKARVPETEANCHDTVVSGWFTEPRSRFGKTSKVQYFNNPMWPGEAHSLKVEKILFQGKSPYQEILVFESSTYGNVLVLDGIVQLTDKDECAYQEMVTHXFPLCSIPAPKNVLVVGGGDGGVLREIARHDSVETIDICEIDQLVIDVCKEFFPNLSIGFKDPRVRLHVGDAVDFLRNSPEGKYDAIIVDSSDPIGPAQGTRWRKLFIQTIARALKPGXGVLCNLAESMWLHTHLIQDMLAICRQTFKGAVHYAWTSVPTYPSGVIGFLLCAKEGRAVNFLTPVNPIEKIEGTTKAGRELRFYNSEIHRAAFVLPTFVRRELEAYTTPSTSAENEKPKESVSEPQKIKILSNNAILTAS

SEQ ID NO: 11541 - protein, 452 aa, Burkholderia fungorum LB400
MLIAPCDKPGRRPALNNYIMRNEMTTRANLTSPKTNDYVSREEALEILAVKMQSFYTYVSRGLIRRLDQPGKKRKLYLKSDVQRLAAKSQARSNTGAKAGDSMRFGNPIIQTWICEITPRGPCYRSRLATDLAAANVSYESVAELLWLGTFRTPEVPWKAEPLPKGLDAWIPLAKSMAGTGNGLQIINLLLAALRALDGNELDTNYDNVIPLARRLIQVLAGVGGFLGEDQQLERFRTGDSVAECFVRGLGFGGRPEVSEAINKALVISAEHELTPPTFAARVCASTGSDLYACVATGILAHMGSLQGGGADGAEVVLEDLLRPARRKMLRQRWATKYDFPGFNHPLYERDPRAVALLDIVRGLKSPHPDASKALKLIDEIEQEVNFYPNITAALVVLCRSLGLPRRAANLLFSVSRSAGWIAHALEQRVAGYMLRPRAKFSSQSDSLTNNV

SEQ ID NO: 11542 - protein, 445 aa, Zea mays
  misc_feature (272)..(272): Xaa can be any naturally occurring amino acid
  misc_feature (311)..(311): Xaa can be any naturally occurring amino acid
  misc_feature (351)..(351): Xaa can be any naturally occurring amino acid
MYRAKRAALSPKVKRRVGKYELGRTIGEGTFAKVRFAKNTENGEPVAIKILDKEKVKRHRLVEQIKREICIMKLVRHPNVVRLFEVMGSKARIFIVLEYVTGGELFEIIATNGRLKEDEARKYFQQLINAVDYCHSRGVYHRDLKLENLLLDAAGNLKVSDFGLSALTEQVKADGLLHTTCGTPNYVAPEVIEDGGYDGATADIWSCGVILFVLLAGYLPFEDDNIIALYKKISAAQFSCPSWFSAGAKNMSTSCLDFLFTTTMVVLSRFEXLENEPAVDLRTGGSGSRVSGHVAPPKSPDFFQEYGMGNXFQKKSNNASKTQVEETDEARKKFSNAKAITTSQFLQCPPXEIITKIEEAAKPLGFDVQKKKYKMRMENPKAGRKGNLNVATEVFQIAPSLHVVELKKAKGDTLEFQKFYRSLSTQLKDVVWKCDGEVDGNSAAA

SEQ ID NO: 11543 - protein, 140 aa, Brassica napus
RASNVVYLRCAAELLEMTEEYGEGNLISQTETFFNQVVLKSWEDSVKALQSCDEVLEYADELNITKKCIESLAMRAFTDPNLFGWPVVEHGGGPMQSPGGSVLWNGISTGARPRQTNSDWWYEDASMLSFPLFQRLITVM

SEQ ID NO: 11544 - protein, 315 aa, Hyoscyamus niger
MEVTNQSNGCSNNEKESPYISSVLPGWFSEISPLWPGEAHSLKVEKILFQGKSDYQNVMVFQSSTYGKVLVLDGVIQLTERDECAYQEMITHLPLCSIPNPKKVLVIGGGDGGVLREVSRHSSVEQIDICEIDKMVVEVAKEFFPDVAVGYEDPRVNLHIGDGVAFLKNVPAGTYDAVIVDSSDPIGPAQELFEKPFFESIARALRPGGVVSTQAESIWLHMHIIEEIVANCRQIFKGSVNYAWTTVPTYPSGMIGFMLCSTEGPAVDFKNPINPIDDESGPKTIAPLKFYNSEIHQASFCLPSFAKRVIESKGK

SEQ ID NO: 11545 - protein, 201 aa, Streptococcus agalactiae
AIKQQTIFDIDNAKTEVEIDNLVHDAFSKMNATVAKFQKGLETNTPETPDTPKIPEIPQAPDTPQAPDTPHVPESPKAPEAPRVPESPKTPEAPHVPESPKAPEAPRVPESPKTPEAPHVPESPKTPEAPKIPEPPKTPDVPKLPDVPKLPDAPKLPDGLNKVGQAVFTSTDGNTKVTVVFDKPTDADKLHLKEVTTKELA

SEQ ID NO: 11546 - protein, 201 aa, Streptococcus agalactiae
AIKQQTIFDIDNAKTEVEIDNLVHDAFSKMNATVAKFQKGLETNTPETPDTPKIPELPQAPDTPQAPDTPHVPESPKAPEAPRVPESPKTPDTPHVPESPKAPEAPRVPESPKTPEAPHVPESPKTPEAPKIPEPPKTPDVPKLPDVPKLPDAPKLPDGLNKVGQAVFTSTDGNTKVTVVFDKPTDADKLHLKEVTTKELA

SEQ ID NO: 11547 - protein, 471 aa, Vibrio vulnificus YJ016
MAMKLVWLRRDLRCVDNTALNHAIATSQEVVACFVATPLQWRDHHMAPMQADLIARRLAVLAEELNALNIPLLYDEVDDYAQSATRVANWAEQLAVSEVVLNREYEVNERVRDEQLVNRLASSEMGVLDVEDKCVQAPGCVLNKQGDYFKVFTPFKKAWLKSFIPPQIIKTSAAQPVVLPEALQSSLWHEQAPFSYPRQSSEAWSVDSQQIRETLRRFCHEEVDRYHEQRDFPATAGTSVLSPYLAIGAISVRQCIARLYWQQSYLSNGREVWLSELIWREFYHHLIHFEPKLVKGQGFVEWEKHLLWPAKPDWFERWCRGETGYPIVDAAMRQLNQTGWMHNRLRMIVASFLTKDLHVNWRLGEQYFMQKLVDGDFAANNGGWQWCASTGCDGQPYFRIFNPITQGEKFDPNGEFVKHWLPELAEVPSKFVHQPWKWLGHMRLDYPAPMVDHKQEREITLSLYTQAKDCL

SEQ ID NO: 11548 - protein, 310 aa, Neurospora crassa
MADHTEVDLDSIIDRLLEVRGSRPGKQVQLLEAEIRYLCTKAREIFISQPILLELEAPIKICGDIHGQYYDLLRLFEYGGFPPEANYLFLGDYVDRGKQSLETICLLLAYKIKYPENFFILRGNHECASINRIYGFYDECKRRYNIKLWKTFTDCFNCLPIAAIIDEKIFTMHGGLSPDLNSMEQIRRVMRPTDIPDCGLLCDLLWSDPDKDITGWSENDRGVSFTFGPDVVSRFLQKHDMDLICRAHQVVEDGYEFFSKRQLVTLFSAPNYCGEFDNAGAMMSVDESLLCSFQILKPAEKKQKYVPSLR

SEQ ID NO: 11549 - protein, 469 aa, Capsicum chinense
PIPVPVFGNWLQVGDDLNHRNLTDYAKKFGDIFLLRMGQRNLVVVSSPESAKEVLHTQGVEFGSRTRNVVFDIFTGKGQDMVFTVYGEHWRKMRRIMTVPFFTNKVVQQYRGGWESEVASVVEDVKKNPESATNGIFLRKRLQLMMYNNMFRIMFDRRFESEDDPLFVKLRALNGERSRLAQSFEYNYGDFIPIFRPFLRGYLKICKEVKEKRLQLFKDYFVDERKKLANTKSMDSNALTCAIHHILDAQQKGEINEDNVLYIVENINVAAIQTTLWSIEWGIAELVNHPHIQQKLREEIDTVLGPGVQVTEPDTQKLPYLQAVIKETLRLRMAIPLLVPHMSLHDAKLAVYDIPAESKILVNAWWLANNPAHWKKPEEFRPERFLEEEKHVDANGNDFRFLPFGVGRRSCPGIILALPILGITLGRLVQNFEMFPPPGQSKLDTSEKGGQFSLHILKHSTIVMKPRSF

SEQ ID NO: 11550 - protein, 207 aa, Streptococcus agalactiae
AIKQQTIFDIDNAKTEVEIDNLVHDAFSKMNATVAKFQKGLETNTPETPDTPKIPELPQAPDTPQAPDTPHVPESPKAPEAPRVPESPKTPEAPHVPESPKAPEAPRVPESPKTPEAPHVPESPKTPEAPKIPEPPKTPDVPKLPDVPKLPDVPKLPDAPKLPDGLNKVGQAVFTSTDGNTKVTVVFDKPTDADKLHLKEVTTKELA

SEQ ID NO: 11551 - protein, 138 aa, Triticum aestivum
VAPFQGLKSTAGLPVSRRSNGASLGSVSNGGRIRCMQVWPIEGIKKFETLSYLPPLSTEALLKQVDYLIRSKWVPCLEFSKVGFIFREHNASPVEVEEVKKEYPDAYVRIIGFDNMRQVQCVSFIAFKPPGCEESGKA

SEQ ID NO: 11552 - protein, 251 aa, Glycine max
  misc_feature (91)..(91): Xaa can be any naturally occurring amino acid
MTKNYPAVSEEYQKAIEKCKRKLRGLIAEKNCAPIMVRLAWHSAGTFDCASRTGGPFGTMRFDDELAHGANNGLHIALRLLEPIREQFPTXISHADFHQLAGVVAVEVTGGPEIPFHPGREDKSQPPPEGRLPDATKGCDHLRQVFLKQMGLTDQDIVALSGAHTLGRCHKDRSGFEGAWTSNPLIFDNSYFKELLSGEKEGLLQLPSDKALLDDPVFRPLVEKYAADEEAFFADYAEAHLKLSELGFADA

SEQ ID NO: 11553 - protein, 245 aa, Aspergillus nidulans FGSC A4
MKSPIPLLHGTGSIPPIGLGTWQSSANATCLAVKHALQHGYRHIDTALNYGNEKEVGQGIRDSGIPREEIWVTTKLDNHWHHRVREGLESSLRDLGLEYVDLYLIHFPCSTDPEDRSKHLKDWDFVRTWQEMQKLLGTGKVRNIGVSNFQISHLERLLNDPSCKVIPAVNQIELHPYNPSLRWNLQRGVSVIPKSITPARIDSNIDLEGFELSPDEMGEISAIKTRAKVVGDSWMPIRVFTGDDE

SEQ ID NO: 11554 - protein, 207 aa, Streptococcus agalactiae
AIKQQTIFDIDNAKTEVEIDNLVHDAFSKMNATVAKFQKGLETNTPETPDTPKIPELPQAPDTPQAPDTPHVPESPKAPEAPRVPESPKTPDTPHVPESPKAPEAPRVPESPKTPEAPHVPESPKTPEAPKIPEPPKTPDVPKLPDVPKLPDVPKLPDAPKLPDGLNKVGQAVFTSTDGNTKVTVVFDKPTDADKLHLKEVTTKELA

SEQ ID NO: 11555 - protein, 267 aa, Xanthomonas campestris pv. campestris str. ATCC 33913
MTVPAFGLGTFRLKDQVVIDSVRNALALGYRAIDTAQIYDNEAQVGQAIADAGVPRDQLFVTTKIWVDRFSRDTLQPSLQESLRKLGTDYVDLTLIHWPSPKDQVPMREYLEALADAKAQGLTRAIGVSNFTIALTRQAIEILGADAIATNQIEVHPYLQNRTLIAFLREQGIHVTSYMTLAVGEVLKDPVIQAIARRHDATPAQVTLAWALQQGYSVIPSSTKRANLESNLKAQSLHLSEQDMAEIAALDRGERLANPKAIAPDWD

SEQ ID NO: 11556 - protein, 213 aa, Streptococcus agalactiae
AIKQQTIFDIDNAKTEVEIDNLVHDAFSKMNATVAKFQKGLETNTPETPDTPKIPELPQAPDTPQAPDTPHVPESPKAPEAPRVPESPKAPEAPRVPESPKTPEAPHVPESPKAPEAPRVPESPKTPEAPHVPESPKTPEAPKIPEPPKTPDVPKLPDVPKLPDAPKLPDGLNKVGQAVFTSTDGNTKVTVVFDKPTDADKLHLKEVTTKELA

SEQ ID NO: 11557 - protein, 197 aa, Populus kitakamiensis
MAFAGTTQKCMACDKTVYLVDKLTADNRAYHKACFRCHHCKGTLKLGNYNSFEGVLYCRPHFDQLFKRTGSLDKSFEGTPKIVKPEKPVDGEKPVSTKVSTMFAGTREKCFGCKNTVYPTEKVSVNGTPYHKSCFKCIHGGCTISPSNYIAHEGRLYCKHHHNQLIKEKGNLSQLEGDIEKDSMSNKTNGREVAAES

SEQ ID NO: 11558 - protein, 461 aa, Mycobacterium tuberculosis H37Rv
MTATLTKTLGSLDDFRGTLCVPGDPDYPRVRAIWNGQVAREPALIATCHDACDVRTVLRRAVDAGMVTAVRGGGHNVAGTALCDGGVVIDLSAMRAVSLDPATGRVRVQGGATLADLDHATVPFARVAPAGIVTTTGVGGLTLGGGVGWTTRRFGLSCDNLVAVRLVTAAGDYLSVDDERDPELMWGLRGGGGNFGIVTEFEFATHPFGPVAVAGFVVYRLDDGPAVLRGYRQFAAAAPEEVTTIVVLRHAPPAPWIPVDQRGKPVVMIGAVHTGSIQTGIEALRPVKSLARPVADTVWPTPFLAHQAVLDASNPAGHRYYWKSDHLAELNDEAIDLLVEQTAQLSSPDSLIGIFQLGGAAARGGERSCFPSRHARFMVNYATHWTEAREDDLHRQWTRDAIEALAPYGLGTAYVNFTADDAPMHVETLYSTTEFSRLVTLKNRLDPDNVFRNNHNIRPSA

SEQ ID NO: 11559 - protein, 289 aa, Hordeum vulgare
ITTTTMQFNPSGLELERPQQLFPQWQPLPQQPPFLQQEPEQPYPQQQPLPQQQPFPQQPQLPHQHQFPQQLPQQQFPQQMPLQPQQQFPQQMPLQPQQQPQFPQQKPFGQYQQPLTQQPYPQQQPLAQQQPSIEEQHQLNLCKEFLLQQCTLDEKVPLLQSVISFLRPHISQQNSCQLKRQQCCQQLANINEQSRCPAIQTIVHAIVMQQQVQQQVGHGFVQSQLQQLGQGMPIQLQQQPGQAFVLPQQQAQFKVVGSLVIQTLPMLCNVHVPPYCSPFGSMATGSGGQ

SEQ ID NO: 11560 - protein, 180 aa, Spinacia oleracea
MASSVLSSAAVATVSRTPAQASMVAPFTGLKSTVGFPATKKNDDITSLASNGGRVQCMKVWPTQNMKRYETLSYLPPLTTDQLARQVDYLLNNKWVPCLEFETDHGFVYREHHNSPGYYDGRYWTMWKLPMFGCTDPAQVLNELEECKKEYPNAFIRIIGFDSNRQVQCVSFIAYKPAGY

SEQ ID NO: 11561 - protein, 197 aa, Populus kitakamiensis
MAFAGTTQKCMACDKTVYLVDKLTADNRAYHKACFRCHHCKGTLKLGNYNSFEGVLYCRPHFDQLFKRTGSLDKSFEGTPKIVKPEKPVDGEKPVSTKVSTMFAGTREKCFGCKNTVYPTEKVSVNGTPYHKSCFKCIHGGCTISPSNYIAHEGRLYCKHHHNQLIKEKGNLSQLEGDIEKDSMNNKTNGREVAAES

SEQ ID NO: 11562 - protein, 191 aa, Saccharomyces cerevisiae
MQTLKCVVVGDGAVGKTCLLISYTTNQFPADYVPTVFDNYAVTVMIGDEPYTLGLFDTAGQEDYDRLRPLSYPSTDVFLVCFSVISPPSFENVKEKWFPEVHHHCPGVPCLVVGTQIDLRDDKVIIEKLQRQRLRPITSEQGSRLARELKAVKYVECSALTQRGLKNVFDEAIVAALEPPVIKKSKKCAIL

SEQ ID NO: 11563 - protein, 1684 aa, Gibberella zeae PH-1
MPGSTIDTPAVALSFANNFWGKEDAGVTPLLSRMTAAKTTCDELRAFYGARASIEEEYSRKLLNLSRKALGSQESGTLKTSLDTVRGEVEQMAKQHQLIGAEMKSELEEPLAAFTGGMKERRKIIQNTVEKLLKVKMQQTQQVNKTRDKYEQECLKIKGYLAQGHMVMGQEERRNKAKLEKTQIALAASSTEYENAVKALEDTTARWNREWKAAADKFQDLEEERLDFTKSSMWTFANIASTVCVSDDSSCEKIRLSLEVMDVEKDIITFITEKGTGQEIPDAPKYINFCRGDVTDNQSETSEDDNYSVAQFPRMINPAFRSSSPQPSTFESHHDPNSALAKELAHKDNAPAKREPNAPVQKSATLPPDDILQIGPQKTQPQQIQAAPQQRQQHQPQMQHSSQLQHPSQLQHHSQLQRPSQMQRPSQLQHPSQLQHSSQPHHPSQLQHPSQLQHPSQSQRSSQPQRPSQHPAQLQHQPQQQYSPQRQHPSQQPPHSADHRMQQQMRPLEMRPADMRNANMRQHEPRPSLEMRYSGEVRPSMQSRPSVDTRQVPDARTSLELRRPIEDPSRRQQPATYTAYDANQHGAVSAVPHDPYAAEGMTMLCRTGPSPISDHDSQVTSARPSSRDSHSDYSNPNSFSSVEPPSGKTSPVKQDPIRQDPAPAPAPAPVQTRAPPPVTAPAPAPVQARAPAPVAAPAPVPVQARASVPTPVPALTPAPKPAPAPVAAASAPTPSAVTPATSPVKLVAKKKSGGFLKNHSPFRRKSQKELQQPNRNTWHASNTPSLSSPVRRAQPQTHEPTNNVVTQERTQSPEPIDANASLALGVGQNVFPVSTPDTKKKPGAAAAQEPAEEMDPIALALAELKGVTLGKNSSMRVSADHYSGIATPASGSEAASRQASATRPAPTPSNPDIAAAKRGTPPPSYQTPTSRLGVPPPAVTSRAMKEATKKATSQTRSMFENGGSTPGTFNSTSSRTNTRATEAKRAEPSLSQSVPPTASRPTTRTATHGRGESGSYSSASMSRPGTRGTEMGRGEPAGYGTSPARSGTRATDMSRPDTRGFNASPLSRPGTRGSDMSRGGSGIYGTSPGSRPGTRGTDMPRATSPAPAPARSVSPQPPINDNMSYRSVSPNPYAASQRSPSVMSSPQKHGSAQGYYPQSPASRGPSPSPYGQQSRPGSGYAGSDMAIQLAPVSDPYGSVRSGGSRPASRANSYYDDGSTRQRSQSVADPSRLYTPDGRAILHYARALYMYQAAIPEELGFAKGDYLAVLRHQDDGWWEAEVHGGDGSVGLVPIVTQLTEYMLRIGELIRLSMETLQETARVVTSKPVQRAVVNTVLLVSTAATLFCTAAIASVLFFQNFLPHEVVTLPVHLQYGSGINPYGIASLQTPPMKTQQEYDVSLLLSMPRSVPNVERGNFMISLHMLGAKADVWLHAQAEQHASSHEGFGQANVLFSSRRPALFPYVDPLVSVASRVLFLIYHLFTPGSSTNSVIIPLAERVSFSKDSLLPKSAYIEVEAGQTIQVYNAYLQLTAQLRGLRWMMVHYRISTFLALTVVFWAFEVIFMGVAWGIWSVASGPAEEDDAKIRRLKGLRDDHEDEPTDHEETFPTYGKQQPLKYEPDIKPEQDPEQPLSEIPRLGADADDEDDGSFDDKDEEDVQHRDSGIGTSYSEEGTSSIRRRTSRNRL

SEQ ID NO: 11564 - protein, 294 aa, Gibberella zeae PH-1
MTSKLALSSTKKLNSGYQIPLLGYGVYQVPKDQASDVCKKALEIGYRHIDSASGYYNQGPSAAGIQAAGVPREEVFFTTKIFTRQFPLNYENAHKQVDIALDETKLDYLDLVLIHAPYGGSDARKGAWKALVECVEAGKVRSLGVSNYGVHHLDELEAYIKELETERGGAGKGGVISVGQWEVHPWMTRPDIVKWCQDRNIAVEAYCPIVRGERFDDPKVKALAEKYGKSPAQILLRWSLQRGYVPLVKSVTPSRILENTQLYDFELTEEEVEDLATTDYSPCAWDPTVEPLEK

SEQ ID NO: 11565 - protein, 403 aa, Brassica oleracea
YQGVYPVKGNQDRFVVEDIVRFGSQFRFGLEAGSKPEILLAMSCLCKGNPDAFLVCNGFKDAEYIFLALLGRKLALNTVIVLEQEEELDLVIDLSQKMNVRPVIGLRAKLRTKHSGHFGSTSGEKGKFGLTTTQIVRVMRKLSQSGMLDCLQLLHFHIGSQIPSTSLLSDGVAEAAQLYCELVRLGAHMKVIDIGGGLGIDYDGSKSGESDLSVAYTLEEYAEAVVASVRFVCDRRSVKHPVICSESGRAIVSHHSVLIFEAVSAVKPMAHQANPDDIQFLLEGNEEYEDLYAAVMRGDHESCLLYVDQLKQRCVEGFKDGVLSIEQLASVDGLCEWVLKAIGASDPVHTYNINLSVFTSIPDLWGIEQLFPIVPIHKLDQRPGTRGILSDLTCDSDGKISKF

SEQ ID NO: 11566 - protein, 164 aa, Glycine max
  misc_feature (73)..(73): Xaa can be any naturally occurring amino acid
  misc_feature (90)..(90): Xaa can be any naturally occurring amino acid
  misc_feature (129)..(129): Xaa can be any naturally occurring amino acid
PTYARNGSRGLNPGSFLTITEGSDSGGYYGQWRTIRRTAVTTTLAGSTADLTTLLSKRTLAGHWNVIDLRYGXLGGYAAITYHCAVVQPXAPIVRGFVAAWVLIGLNKLAAKVEYDDPLDAAQLSQRVXAWRGLFTGLFAKTEYVEEIHGGGTPFCAMMGGGRR

SEQ ID NO: 11567 - protein, 407 aa, Capsella bursa-pastoris
YQGVYPVKGNQDRFVVEDIVKFGSSFRFGLEAGSKPEILLAMSCLCKGNPDAFLVCNGFKDAEYISLALLGRKLALNTVIVLEQEEELDLVIELSQKMNVRPVIGLRAKLRTKHSGHFGSTSGEKGKFGLTTTQIVRVVRKLSQSGMLDRLQLLHFHIGSQIPSTSLLSDGVAEAAQLYCELVRLGAHMKVIDIGGGLGIDYDGSKSGESDLSVAYSLEEYAEAVVASVRFVCDRSSVKHPVICSESGRAIVSHHSVLIFEAVSADKPMVHQATPDDIQFLLEGDEEARANYEDLYAAVMRGDHESCLLYVDQLKQRCVEGFKEGVLSIEQLASVDGLCEWVLKAIGASDPVHTYNINLSVFTSIPDLWGIDQLFPIVPIHKLDQRPGTRAILSDLTCDSDGKINKF

SEQ ID NO: 11568 - protein, 303 aa, Zea mays
YFPAPRIASAVLVCWPRFRSIPDPPSGRASTDFIIHSPAEPICFVCRSIRRSCEFNPRVSMSSYSPPPPPPRDQSMDTEAPNAPITRERRLNPDLQEQLPKPYLARALEAVDPSHPQGTKGRDPRGMSVLQQHAAFFDRNGDGVIYPWETFQGLRAIGCGLTVSFAFSILINLFLSYPTQPGWLPSPLLSIRIDNIHKGKHGSDSETYDTEGRFDPSKFDAIFSKYGRTHPNAITRDELSSMLQGNRNTYDFLGWLAAAGEWLLLYSLAKDKDGLLQRETVRGLFDGSLFERLEDDNNKKKSS

SEQ ID NO: 11569 - protein, 303 aa, Brassica napus
  misc_feature (202)..(202): Xaa can be any naturally occurring amino acid
MVFVKPSKSNAYFKRYQVKFRRRRDGKTDYRARIRLINQDKNKYNTPKYRFVVRFTNKDIVAQIVSASIAGDIVKASAYAHELPQYGLTVGLTNYAAAYCTGLLLARRVLKMLEMDEEYEGNLEATGEDFSVEPTESRRPFRALLDVGLIRTTTGNRVFGALKGALDGGLDIPHSDKRFAGFNKENKQLDAEIHRNYIYGGXHVSNYMKMLNEDEPEKFQTHFSQYLKKGVDAESMEELYKKVHAAIRADPNPKKTEKPAPKTHKRYNLKKLTYEERKTKLIERVKALNGAAGGDDEDEDAQE

SEQ ID NO: 11570 - protein, 141 aa, Zea mays
PLQAGDMVEGAYPVLERNGKECAPGAVLRLSVQYVPVARLTMYHHGVTPGPDFAGVPRTYFPLRRGGKVTLYQDAHVPDGTLPEVRLGNGDCYRHGQCWRDVYDAICQARRLIYITGWSVFHTIHWVSVSLTALLGSMIKR

SEQ ID NO: 11571 - protein, 105 aa, Zea mays
MEHGSLTDSTSSTFSIMYEDHTLANSARFVLNQELCSSKPPTNNCYRMMATKDDAQRMKQAAKYPRVAFCGYTIPHPSEKKVNIRLQTTGDAAKDVLKDALQNLM

SEQ ID NO: 11572 - protein, 52 aa, Glycine max
MGSFLEILCAVLIPPVGVFLRFGCGLEFWLSLLLTFFGFIPGMVYAIWVLTK

SEQ ID NO: 11573 - protein, 145 aa, Triticum aestivum
  misc_feature (90)..(90): Xaa can be any naturally occurring amino acid
  misc_feature (100)..(100): Xaa can be any naturally occurring amino acid
MAPAVMASSATTVAPFQGLKSTAGLPVSRRSGSAGLSSVSNGGRIRCMQVWPIEGIKKFETLSYLPPLSTEALLKQVDYLIRSKWVPCLXFNKVGFVFRXEHNNSPRATKNSILDKCGKLPNVRGATERKRKAQTKGWKAKKRYP

SEQ ID NO: 11574 - protein, 308 aa, Hyoscyamus niger
MEEQGNNESAYISSILPGWFSEISPLWPGEAHSLKVEKILFQGKSDYQNVVVFQSSTYGKVLVLDGVIQLTERDECAYQEMITHLPLCSIPNPKKVLVIGGGDGGVLREVSRHSSVEQIDICEIDKMVIDVSKQFFPNVAIGYEDPRVKLHVGDGVAFLKNVPEGTYDAVIVDSSDPIGPAQELFEKPFFESVARALCPGGVVCTQAESIWLHMHIIEDIVSNCRQIFKGSVNYAWTTVPTYPSGVIGFMLCSTEGPAVDFKNPINPIDADDSHTKTRGPLKFYNSEIHSASFCLPSFAKRVIESNAK

SEQ ID NO: 11575 - protein, 223 aa, Thermus thermophilus HB27
MELYLDTASLEEIREIAAWGVLSGVTTNPTLVAKVFAAKGEALTEEAFAAHLRAICETVGGPVSAEVTALEAEAMVAEGRRLAAIHPQIVVKLPTTEEGLKACKRLSAEGIRVNMTLIFSANQALLAARAGASYVSPFLGRVDDISWDGGELLREIVEMIQVQDLPVKVIAASIRHPRHVTEAALLGADIATMPHAVFKQLLKHPLTDIGLKRFLEDWEKVKP

SEQ ID NO: 11576 - protein, 72 aa, Brassica napus
  misc_feature (52)..(52): Xaa can be any naturally occurring amino acid
  misc_feature (65)..(65): Xaa can be any naturally occurring amino acid
SDFTAFTKDQERLISMADDAGVDYLEGQLFMSNGVVYTSFFSQSNQSKIADXVKSHGIIYVLEVXKVYDDPT

SEQ ID NO: 11577 - protein, 165 aa, Triticum aestivum
MYSLRLATSGSTALGFTLGRFGGKTGGGAAAGGLAAPAAAAHVGRRSVSATSNSAAPVPGDQGVGMDPGKQQQQHKPHAPAGEQQGEDVHKTTTAHGDVMTHSFGEGYSTRSDEEGFGGVYGQNDPVLNPGTEVHPDHPDYDKSQGSEVKEKEKARHLKDDKHAT

SEQ ID NO: 11578 - protein, 438 aa, Treponema denticola ATCC 35405
MKKTDFSISTLGECKIQSPIMLSETHGDLIANYVTDNEFIRYNLDASLGETGEPLTHADIIEKAGPRQKIYFSPNYVHAAIATCGGLCPGINDVIRAIVRCLWTRYGVRRISGIKFGYKGFISEYGFSPVPLTPEAVNGIHKTGGSFLGTSRGGGTRVTEIVDGIEQMNINMVFFIGGDGTQKGALEVSREIERRKLKISVIGIPKTIDNDLSFIQKSFGFDTAIAKATESVAAANMEASSQINGIGLVKLMGRESGFIATHTAIACHEAHFVLIPEVRFELGGENGFLKLLEKKLIENGYALIVAAEGAGQHLMNIEEETDASGNKKLADIGLFLKKEITEYFDKIGMHINLKYIDPSYQIRSSIAAPIDSVYCERLGNNAVHAAMAGKTRTLIGLVNNKFVHLPIEQVVSERKYVNPESSLWRDALDATGQPTTMI

SEQ ID NO: 11579 - protein, 170 aa, Zea mays
MAPTVMMASSATAVAPFQGLKSAASLPVARRSSRSLGNVSNGGRIRCMQVWPAYGNKKFETLSYLPPLSTDDLLKQVDYLLRNGWIPCLEFSKVGFVYRENSTSPCYYDGRYWTMWKLPMFGCNDATQVYKELQEAIKSYPDAFHRVIGFDNIKQTQCVSFIAYKPPGSD

SEQ ID NO: 11580 - protein, 511 aa, Gossypium hirsutum
MMAVLFVYLGFMVFGIIVLRFLYRFIDNNGLPRNWPFVGMIPTLLLNIHRPHDKVAQVLRRSNGTFFYRGLWFTNTSFLATSDPENVRYILSSNSSVYLKGPEWLKQFDIFGEALFNSDGEAWKCHRRVFHAFLNHPQYRQSLSKVLHQRIEEALVKVLEYVSGREMVVNLQDLLAGHAFDIGCITGVGFDPGLLSIEFPENRFQKAMSDTLEAAFYRYVVPDSLWKLQSWPQIGKGKKRSDAWKALDDLLTQFISTQRHKSTKSVASSGSNEEHDFNFLNCYLTGHEITGPTPKESLIRDNLIHFLFASDGTYSLTLTWFFYLISKAPVVENKIREEIKRHLSMKQVEGSLQIPSNYDELSKLTYLHAALCETLRLYPPIPFDFRTCTKQEYLPSGHRVDQNTRIIIGIHAMGRMESLWGEDCYAFKPERWIGEDGKIKRESPTKFSAFLAGPRICPGKEVSFLLMKATATAIIHNYNVHVVEGQNIGPKNSVVYQMKKGLMVRIKKRWS

SEQ ID NO: 11581 - protein, 316 aa, Coffea arabica
MADAVNSNSKEEAAQLPDGVSSVIPGWFSEISPMWPGEAHSLKVEKILFQGKSDYQNVMVFQSSTYGKVLVLDGVIQLTERDECAYQEMIAHLPLCSIPSPKKVLVIGGGDGGVLREVARHLSVEQIDICEIDKMVVDVSKQFFPDVAVGFEDPRVVLHIGDGVAFLKAVPEGTYDAIIVDSSDPIGPAQELFEKPFFESVAKALRPGGVVCTQAESIWLHMHIIEDIVANCRQIFKGSVNYAWTTVPTYPSGVIGFMLCSTEGPPVDFKHPINPIDANDGRSKTMKPLKFYNSEIHSAAFCLPSFAKKVIDSKAN

SEQ ID NO: 11582 - protein, 314 aa, Nicotiana sylvestris
MEAANHNNNGCTNESPYISSVLPGWFSEISPLWPGEAHSLKVEKILFQGKSDYQNVMVFQSSTYGKVLVLDGVIQLTERDECAYQEMIAHLPLCSIPNPKKVLVIGGGDGGVLREVSRHSSVEQIDICEIDKMVVEVSKQFFPDVAVGYEDPRVNLHIGDGVAFLKNVAAGTYDAVIVDSSDPIGPAQELFEKPFFESIARALRPGGVVSTQAESIWLHMHIIEEIVANCRQIFKGSVNYAWTTVPTYPSGMIGFMLCSTEGPAVDFKNPINPIDDDASHNKTLGPMKFYNSELHKASFCLPSFAKRVIESKGK

SEQ ID NO: 11583 - protein, 313 aa, Psychrobacter sp. 273-4
MSALQQLRTMTTIVADTGDLAAIERLKPIDATTNPSLITKALIHPDNEAVLSETMSRHRNDIDAVIDELTIQIGCNILSLIEGRVSTEVDARLSYDTQATIDKALAFMEAYQKSGIDSERVLIKMAATWQGIEAARYLETQGIHCNLTLLFGQHQAIACADAGVTLISPFVGRILDWQKRQQNRQNIPVSDDMGVQSVKLIYQYYKQHGYKTQVMGASFRSTEQILALAGCDLLTIAPNLIDELAAMDIEVTRQLSESMSMDMTDMTRVSLSAEEFSHAYQQDTITQDLLPKGIDGFISARDELAHMLASMRS

SEQ ID NO: 11584 - protein, 249 aa, Triticum aestivum
  misc_feature (177)..(177): Xaa can be any naturally occurring amino acid
  misc_feature (194)..(194): Xaa can be any naturally occurring amino acid
  misc_feature (206)..(206): Xaa can be any naturally occurring amino acid
  misc_feature (223)..(223): Xaa can be any naturally occurring amino acid
  misc_feature (226)..(226): Xaa can be any naturally occurring amino acid
  misc_feature (237)..(237): Xaa can be any naturally occurring amino acid
MKTFLIFALLAVAATSAIAQIENSHIPGLEKPSQQQPLPLQQTLSHHQQQQPVQQQPQPFPQQQPCSQQQQPPLSQQQQPFPQQPQQPFPQTQQPQQPFPQQPQQPFPQTQQPQQPFPQLQQPQQPFPQPQQQLPQPQQPQQSFPQQQRPFIQPSLQQQLNPCKNILLQQCKPASLXVSSLWSIIWPQSDCQVXMRQQCCQQLAQXPQQSNSQASIRLDSIIXQQXQQQQQQQGCNXANGGARTIPKVL

SEQ ID NO: 11585 - protein, 219 aa, Streptococcus agalactiae
AIKQQTIFDIDNAKTEVEIDNLVHDAFSKMNATVAKFQKGLETNTPETPDTPKIPELPQAPDTPQAPDTPHVPESPKAPEAPRVPESPKTPEAPHVPESPKAPEAPRVPESPKTPEAPHVPESPKAPEAPRVPESPKTPEAPHVPEAPKTPEAPKIPEPPKTPDVPKLPDAPKLPDGLNKVGQAVFTSTDGNTKVTVVFDKPTDADKLHLKEVTTKELA

SEQ ID NO: 11586 - protein, 219 aa, Streptococcus agalactiae
AIKQQTIFDIDNAKTEVEIDNLVHDAFSKMNATVAKFQKGLETNTPETPDTPKIPELPQAPDTPQAPDTPHVPESPKAPEAPRVPESPKTPEAPHVPESPKAPEAPRVPESPKTPEAPHVPESPKTPEAPKIPEPPKTPDVPKLPDVPKLPDVPKLPDVPKLPDVPKLPDAPKLPDGLNKVGQAVFTSTDGNTKVTVVFDKPTDADKLHLKEVTTKELA

SEQ ID NO: 11587 - protein, 356 aa, Magnaporthe grisea 70-15
MSRANPPSNSSGSRKISFNVSEQYDIQDVVGEGAYGVVCSAIHKPSGQKVAIKKITPFDHSMFCLRTLREMKLLRYFNHENIISILDIQKPRSYETFNEVYLIQELMETDMHRVIRTQDLSDDHCQYFIYQTLRALKAMHSANVLHRDLKPSNLLLNANCDLKVCDFGLARSAASQEDNSGFMTEYVATRWYRAPEIMLTFKEYTKAIDVWSVGCILAEMLSGKPLFPGKDYHHQLTLILDVLGTPTMEDYYGIKSRRAREYIRSLPFKKKVPFRTLFPKTSDLALDLLEKLLAFNPVKRITVEEALKHPYLEPYHDPDDEPTAPPIPEEFFDFDKHKDNLSKEQLKQFIYQEIMR

SEQ ID NO: 11588 - protein, 237 aa, Streptococcus agalactiae
AIKQQTIFDIDNAKTEVEIDNLVHDAFSKMNATVAKFQKGLETNTPETPDTPKIPELPQAPDTPQAPDTPHVPESPKAPEAPRVPESPKTPEAPHVPESPKAPEAPRVPESPKTPEAPHVPESPKTPEAPHVPESPKAPEAPRVPESPKTPEAPHVPESPKTPEAPKIPEPPKTPDVPKLPDVPKLPDAPKLPDGLNKVGQAVFTSTDGNTKVTVVFDKPTDADKLHLKEVTTKELA

SEQ ID NO: 11589 - protein, 181 aa, Xanthomonas campestris pv. campestris str. ATCC 33913
MSQSIHDIPVTDINGGATSLAAHRGKVLLVVNVASKCGLTPQYEGLEALYRDKQAQGLEVLGFPANDFNGQEPGSEAEIAQFCQLTYDVTFPLFSKIAVTGAEIHPLYQALTSAQPQATGDGPMREKLAGYGIAANPAPGVLWNFEKFLIGRDGQVIERFAPDVAADDVRLRQAVDAALAH

SEQ ID NO: 11590 - protein, 120 aa, Gossypium hirsutum
MASSMSLKLACVVVLCMVVGAPLAQGAVTCGQVTNSLAPCINYLRGSGAGAVPPGCCSGIKSLNSAAQTTPDRQAACRCIKSAAAGITGINFGLASGLPGKCGVNIPYKISPSTDCNSVK

SEQ ID NO: 11591 - protein, 249 aa, Streptococcus agalactiae
AIKQQTIFDIDNAKTEVEIDNLVHDAFSKMNATVAKFQKGLETNTPETPDTPKIPELPQAPDTPQAPDTPHVPESPKAPEAPRVPESPKAPEAPRVPESPKTPEAPHVPESPKAPEAPRVPESPKAPEAPRVPESPKTPEAPHVPESPKAPEAPRVPESPKTPEAPHVPESPKTPEAPKIPEPPKTPDVPKLPDVPKLPDAPKLPDGLNKVGQAVFTSTDGNTKVTVVFDKPTDADKLHLKEVTTKELA

SEQ ID NO: 11592 - protein, 193 aa, Nicotiana tabacum
MAFAGTTQKCMACDKTVYLVDKLTADNRIYHKACFRCHHCKATLKLGNSNSFEGVLYCRPHLIGLFKQTGSLDKSFEGTPKIVRPQKPIDSEKPQVAKVTSMFGGTREKCFGCKKTVYPTEKVSVNGTPYHKSCFKCSHGGCVISPSNYIAHEGRLYCKHHHIQLIKEKGNLSKLEGDHEMNSTTTTEVTAES

SEQ ID NO: 11593 - protein, 202 aa, Triticum aestivum
MLLPTRRLPAAPSRPSVHPYISPARPSLRFRPQYGRAATARATSATPPVFGDTLLGLYEKERLGLSRYADEESREDVFWETLDADLQYWTRSLRPGQWYPGHIAKTEKELKGQLKLMDVAIEVRDARIPLATTHPKMDSWLGNRRRIIVMNREDMVSADDRNAWATYFSSQGIKVIYSNGQLGMGTMKLGRMAKSAASRGIY

SEQ ID NO: 11594 - protein, 1182 aa, Cryptococcus neoformans var. grubii
MFVTRPPSSSVDHRGSLLDGHTNHTNTPGSSRDDVPSSDSTSTAFHKFKNSSRFSPHYLNIPPGLAFKSYLEKWGPEQVIGFLAIHGCEHHSGIFIKNSIDGKLLLDLDMGILTSLGITKVGERIRLMAGIKCLRQRVAHEAEKHNIPSAHLCNGSLEMDRVKVIIHPKLSASLYVHRHGPFDSGPITARRCPLTPSSSADPEGDPSPMQRSQEVMKHSFITRSSRRQVIPPLPPGQIHNHGIDNSPMPSLRHIPLRSGVSYSDIDVKGMPPLVTQSTNSVFNHTFAVTGSHDTTSCLGGHLRRPDYFRSTNDTFQTCTKRGDNTISELPQRNQESSPSMWKQSGVICEDKAMRNGSLFAPTSHKPFAISITGDNVMEYPHNLPIKNGLPLRSFQSPDKSADDDRLNINPSAPSLDDLRRQLVKFVNAEDGTTRTVNVMKTTSGVEVLERALRKFGKTGTGRALLLDDESHNGGKHEGPLCIDGWGVFAENLQGEEMGPMSEEDLLDICASLRNGAAMQRDALILRQTSKSQKRKDMRFYLGSMPVLPTPVNLPISFSSSHSGQFEQNSALQYTAQHQPLRSKNRSRASMMSIMSGLGVSHPDIKQPTHDSLQSPASVTMPSSKKKSMYNFFGHRPPSELISSHLTDYFPSAKKRDVAKARGSMLRLNIAHSAERNPRSVENLGMIEADDVPFSSTEQSLTEQRDHYFDSSTCQPADTSSPGHVDHNITDPAGNSEGNYRLPYDQKVLPTPITQELHSANSVNPILRTYPPNLPSTYLSARLTDLHRDSFLSQLQPLQHSSSLSSAQPFSSHRRTVDEITAEMQHRQTSLSCDRPTSTIDSDISGPPCNSEISLDHTSEASGISESSSEYCDDHSSVSSEDSEDNSAAHTRAFTTKRNIKWIKGALIGAGSFGSVFLGMDAQSGLLMAVKQVELPRGIAKMEARRRDMLSALEREIELLKDLQHDNIVQYLDSSMDANHLNIFLEYVPGGSVAALLNNYGAFEEALAGNFVRQILTGLNYLHERDIVHRDIKGANILVDNKGGIKISDFGISKKVENSLLNGLHPNRPSLQGSVFWMAPEVVKQTSYTSKADIWSVGCLVVEMLTGTHPWARLTQMQAIFQIGSMGQPEIPSDISVHAADFLSRAFALDYRMRPSAASLLKHAFMVHDGNGGNDEPIQNTYA

SEQ ID NO: 11595 - protein, 249 aa, Streptococcus agalactiae
AIKQQTIFDIDNAKTEVEIDNLVHDAFSKMNATVAKFQKGLETNTPETPDTPKIPELPQAPDTPQAPDTPHVPESPKAPEAPRVPESPKTPDTPHVPESPKAPEAPRVPESPKTPDTPHVPESPKAPEAPRVPESPKTPEAPHVPESPKAPEAPRVPESPKTPEAPHVPESPKTPEAPKIPEPPKTPDVPKLPDVPKLPDAPKLPDGLNKVGQAVFTSTDGNTKVTVVFDKPTDADKLHLKEVTTKELA

SEQ ID NO: 11596 - protein, 457 aa, Magnaporthe grisea 70-15
MGSPSPGTATSPPEDGDTADDYVNPLDQSPRWALATRAYAIRSGASLGFGISNAWAPPELAPVKVIWLDALLGDWKAKRAIRVDVWEPPSQPNTDKPDFPSTSQSSASDLLALAAPNVVVKTPTDEIDDNASIKSGCSSALSSSGRSSSSKLGTPKRPRIYKVASNLSSRSSRSIASIRSRLSRSNTASGLSLDSIPKRPVVINFHGGGFVVGEGTDDSRWCSAVAKSLNAVVFSVSYRLAPGYPFPNAVEDCASAIVQICSQDMASQYAIDTSRVILSGFSAGGNLALASWVALQDPARWGYESVLPSPPLEMAGLALFYPLLDWTIARDTKRQRCERPDLTLPKGLTDLFDASYIYPPLQSSKRDDPRLSPGLMSDRMLQQLPPVHFCLCEYDMLLAEGLTFTERLKSHGRIVETRVVKGEKHAWDKPPLWAPKENAAVEYEAAIESLKTWVGLD

SEQ ID NO: 11597 - protein, 193 aa, Nicotiana tabacum
MAFAGTTQKCMACDKTVYLVDKFTADNRIYHKACFRCHHCKGTLKLGNYNSFEGVLYCRPHFDQLFKQTGSLDKSFEGTPKIVKPQKPIDSEKPQVAKVTSMFGGTREKCFGCKKTVYPTEKVSVNGTPYHKSCFKCSHGGCVISPSNYIAHEGRLYCKHHHIQLIKEKGNLSKLEGDHEMNSTTTTEVTAES

SEQ ID NO: 11598 - protein, 292 aa, Zea mays
MAIATESRGSEDRASAHANEEKRWVLSDFEVGKPLGRGKFGHVYLAREKRSNQIVALKVLFKSQLKQSQVEHQLRREVEIQSHLRHPNILRLYGYFYDQTRVYLILEYAAKGELYKELTRCKHFSERRSATYIASLARALIYLHGKHVIHRDIKPENLLVGAQGEIKIADFGWSVHTFNRRRTMCGTLDYLPPEMVEKTEHDYHVDIWSLGILCYEFLYGVPPFEAKEHSETYRRIVKVDLKFPLKPFVSPAAKDLISQMLVKNSAQRLPLHKVLEHPWIVQNADPSGVCRG

SEQ ID NO: 11599 - protein, 239 aa, Arabidopsis thaliana
MSLIEDCLRSYRFIAIDTEFPSTLRETTQHATDEERYMDMSFSVDRAKLIQLGLTLFDINGRIGGTWEINFSDFGVDDARNEKSIEFLRRNGLDLRKIREEGIRIEGFFSEMFWMLKKTRRNITWVTFHGSYDIAYLLKGFTGEALPVTSERFSKAVARVLGSVYDLKVMAGRCEGLSSRLGLETLAHEFGLNRVGTAHHAGSNNELTAMVFAKVLSPFPLFLRFGSLELRTIESEAIV

SEQ ID NO: 11600 - protein, 447 aa, Glycine max
  misc_feature (35)..(35): Xaa can be any naturally occurring amino acid
  misc_feature (272)..(272): Xaa can be any naturally occurring amino acid
SVIGYSVVILIMERYKILRELGDGSCGHVYKARDXEHYEIVAVKRLKRKFYFWEEYTNLREVMILRKMNHSNIIKLKEVVRENNELFFIFEYMDCNLYQLIKEREKPFSEEEIRCFMRQVLQGLSHMHKKGFFHRDLKPENMLVTNDVLKIADFGLAREVSSMPPYTQYVSTRWYRAPEVLLRAPCYTPAVDMWAVGAILAELFFDSLEYPGESEIDQLYKIYGILGMPDSTAFHHCYTPAVDMWAVGAILVVPPVKLSNIIPNASLEALDXITQLLHWDPSRRPDADQSLQHPFFHVDAWVPCPPSDPLELKLSSKRAKPNLELKLQDFGPDPDDCFLGLTLGVKPSVSNSDVVQNVSQGVRENVLFCSDFNDHSDQSVFWTLLSPDQNGIHNSAETSLSLSFSPVQHPPIGVPQSVGFSFQPLQPNILTSPFLALSSPFQRGHCL

SEQ ID NO: 11601 - protein, 407 aa, Arabidopsis arenosa
YQGVYPVKGNQDRFVVEDIVKFGSSFRFGLEAGSKPEILLAMSCLCKGSPDAFLVCNGFKDAEYISLALLGRKLALNTVIVLEQEEELDLVIELSQKMNVRPVIGLRAKLRTKHSGHFGSTSGEKGKFGLTTTQIVRVVRKLSQSGMLDCLQLLHFHIGSQIPSTSLLSDGVAEAAQLYCELVRLGAHMKVIDIGGGLGIDYDGSKSGESDLSVAYSLEEYAEAVVASVRFVCDRSSVKHPVICSESGRAIVSHHSVLIFEAVSADKPMVHQATPDDIQFLLEGNEEARANYEDLYAAVMRGDHESCLLYVDQLKQRCVEGFKEGVLSIEQLASVDGLCEWVLKAIGASDPVHTYNINLSVFTSIPDLWGIDQLFPIVPIHKLDQRPGARGILSDLTCDSDGKINKF

SEQ ID NO: 11602 - protein, 424 aa, Staphylococcus aureus subsp. aureus COL
MKLIKNGKVLQNGELQQADILIDGKVIKQIAPAIEPSNGVDIIDAKGHFVSPGFVDVHVHLREPGGEYKETIETGTKAAARGGFTTVCPMPNTRPVPDSVEHFEALQKLIDDNAQVRVLPYASITTRQLGKELVDFPALVKEGAFAFTDDGVGVQTASMMYEGMIEAAKVNKAIVAHCEDNSLIYGGAMHEGKRSKELGIPGIPNICESVQIARDVLLAEAAGCHYHVCHVSTKESVRVIRDAKRAGIHVTAEVTPHHLLLTEDDIPGNNAIYKMNPPLRSTEDREALLEGLLDGTIDCIATDHAPHARDEKAQPMEKAPFGIVGSETAFPLLYTHFVKNGDWTLQQLVDYLTIKPCETFNLEYGTLKENGYADLTIIDLDSEQEIKGEDFLSKADNTPFIGYKVYGNPILTMVEGEVKFEGDK

SEQ ID NO: 11603 - protein, 302 aa, Triticum aestivum
  misc_feature (252)..(252): Xaa can be any naturally occurring amino acid
LGGSRPRSALKLVGATLAEHTYLFLGAGEAGTGIAELIALEMSRQTKTPIDECRKKIWLVDSKGLIVSARKESLQHFKKPWAHEHEHVGNLLDAVNAIKPTVLIGTSGKGQTFTQEVVEAISSFNEMPIILALSNPTSQAECTAEQAYTWSKGRAVFATGSPFDPVQYNGKIHVPGQANNAYIFPGFGLGVVMSGAIRVHDDMLLAASEALAQQVTQENFDKGLIYPPFSNIRKISAHIAANVAAKAYELGXLASRRPRPKDLVKYAESCMYSPIYRNLQVNPAFIRLCTETVCPTTCLQNP

SEQ ID NO: 11604 - protein, 498 aa, Magnetospirillum magnetotacticum MS-1
MCGIAATIGLSDATAFTSLFGAIGHRGPDESGIRESGDIRIGMHRLAIVGRMGDSVPLIGADGLVLAFNGEIYNHQALRADFPDYPFAGQSDAEVLFPLLKRHGLGGLDRLRGMFAFVLTDMESGEFLAVRDPFGIKPLYYAETGGGFAFASEMKAFAAMGITPRFLPPGHLLTRHGLRRWYRVPGRFRLSRRPNLRALLERAVASHLPPEGPCGVFLSGGLDSSLVAALAARSRPDMVAYSVVLPGSPDEEPAALMAAHLGIRHKVLRATADDIRAALPEVIGALESFNPIMVRNAVPLYLLSKMAAKDCKVVLGGDGADELFAGYDYLSRVPRRFWPQAMDYGFSNLHRTELQRVDRMTMAHGLELRVPFLDREVAEAAVNLPLSAKFGIKDGTPMPKLALREAAEGLLPPSIQWRRKLPLADGSGFGGLDLGAGRDKADPVPGWDVGDEDAVAFFPLWRVRFPLARPDSAIWRDCGRYHDFEECHGRPLLELFRR

SEQ ID NO: 11605 - protein, 487 aa, Chlamydomonas reinhardtii
MPLAELWRLTKLVPLACTVLLLSVRALAVDSGGLNDSADNSSRSLLQESGQASGTSQPYTYSSSDFVLLNGFLIFFMQIGFVSAESGQGRAKNVRNILLKNSVNIMLCAICWWAVGYAFAYGNSGGGFIGTSRFFSDGESFGSKPWFFTWTFCLSCVTIASGCLAERTHLFVYPVYTAVVSIAVHPVIAHWVWAPDSWLNSMTGSPCRFLDFAGGAVVHTVGGLTGLIGAMLCGPRLGRFEDGVGKDIPGHDVSSVSLGSLMLWFGWYGFNCGSTYIYMAQGGSEASAAVSRVALNMTLCASVAGMTSLVVSSIQTGTFDLAVCCNGLMAGLSASTSNVGFLTPWAACITGALAGLLYVGISRLLVRMGVDDPLDSSAIHCGSGILGVLVSGFLARPSYVMQMVGCNCGGVVYATNGGMQLGMQLLGLSCSMVWTAMWALLTFGILKKLQLLRVDQQTELAGIDNMEHGGPAYPEFLQRVQSTRPGY

SEQ ID NO: 11606 - protein, 407 aa, Stanleya pinnata
YQGVYPVKGNQDRFVVEDIVRFGSPFRFGLEAGSKPEILLAMSCLCKGNPDAFLVCNGFKDAEYISLALLGRKLALNTVIVLEQEEELDLVIDLSQKMNVRPVIGLRAKLRTKHSGHFGSTSGEKGKFGLTTTQIVRVMRKLSQSGMLDCLQLLHFHIGSQIPSTSLLSDGVAEAAQLYCELVRLGAHMKVIDIGGGLGIDYDGSKSGESDLSVAYTLEEYAEAVVASVRFVCDRRSVKHPVICSESGRAIVSHHSVLIFEAVSAVKPMAHQANPDDIQFLLEGNEEARANYEDLYAAVMRGDHESCLLYVDQLKQRCVEGFKDGVLSIEQLASVDGLCEWVLKAIGASDPVHTYNINLSVFTSIPDLWGIEQLFPIVPIHKLDQRPGTRGILSDLTCDSDGKIDKF

SEQ ID NO: 11607 - protein, 472 aa, Escherichia coli O157:H7
MTTHLVWFRQDLRLHDNLALAAACRNSSARLLALYIATPRQWAAHNMSPRQAELINAQLNGLQIALAEKGIPLLFREVDDFAASVEIVKQVCAENSVTHLFYNYQYEVNERARDVQVERTLRNVVCEGFDDSVILPPGAVMTGNHEMYKVFTPFKNAWLKRLREGMPECVAAPKVRSSGSIKPAPSITLNYPRQSFDTAHFPVEEKAAIAQLRQFCQNGAGEYEQQRDFPAVEGTSRLSASLATGGLSPRQCLHRLLAEQPQALDGGAGSVWLNELIWREFYRHLMTYYPSLCKHCPFIAWTDRVQWQSNPAHLQAWQEGKTGYPIVDAAMRQLNSTGWMHNRLRMITASFLVKDLLIDWREGERYFMSQLIDGDLAANNGGWQWAASTGTDAAPYFRIFNPTTQGEKFDREGEFIRQWLPELRNVPGKSVHEPWKWAEKAGVKLDYPQPIVEHKEARVQTLAAYEAARKGK

SEQ ID NO: 11608 - protein, 161 aa, Thermoplasma acidophilum
MNRSYSDQAEVDCMEVKVEGFGKGSQIPVEYTCDGEDRMPAIAVEGFPSGTKSLALIVDDPDAPSGLFTHCIIYNIPTSVKVIDSSILKQTGVLSGVNDFGNKGYGGPCPPPGKPHRYYFKVLALDTTLTKAGMKRKDFDNAVRGHVLGQAEYMGTYLRKH

SEQ ID NO: 11609 - protein, 143 aa, Nitrosomonas europaea ATCC 19718
MCHTCDGKDFSPELAWTGVPENTKSLVLIVDDPDAPDPQAPKMTWVHWILYNIPPATRKLPERVTVAELPSGTLEGVNDWERTGYGGPCPPIGTHRYFHKLYALDTLLPDLNQPTKAILEKAMQGHIIARTELIGLYHRSDNV

SEQ ID NO: 11610 - protein, 416 aa, Escherichia coli
MESKVVVPAQGKKITLQNGKLNVPENPIIPYIEGDGIGVDVTPAMLKVVDAAVEKAYKGERKISWMEIYTGEKSTQVYGQDVWLPAETLDLIREYRVAIKGPLTTPVGGGIRELNVALRQELDLYICLRPVRYYQGTPSPVKHPELTDMVIFRENSEDIYAGIEWKADSADAEKVIKFLREEMGVKKIRFPEHCGIGIKPCSEEGTKRLVRAAIEYAIANDRDSVTLVHKGNIMKFTEGAFKDWGYQLAREEFGGELIDGGPWLKVKNPNTGKEIVIKDVIADAFLQQILLRPAEYDVIACMNLNGDYISDALAAQVGGIGIAPGANIGDECALFEATHGTAPKYAGQDKVNPGSIILSAEMMLRHMGWTEAADLIVKGMEGAINAKTVTYDFERLMDGAKLLKCSEFGDAIIENM

SEQ ID NO: 11611 - protein, 238 aa, Oryza sativa (japonica cultivar-group)
MPSRTAPFISRLRLLRTAAALSPFSSSAPPRHSPRILRAIPVGAPHPPRVSAAVSPLVRPVAAGFALFSMATAASSAASVHDFTVKDASGKDVDLSTFKGKVLLIVNVASQCGLTNSNYTELSQLYEKYKDQGFEILAFPCNQFGGQEPGTNEEIVQFACTRFKAEYPIFDKVDVNGDNTAPIYKFLKSSKGGLFGDNIKWNFSKFLVDKEGRVVERYAPTTSPLSMEKDIKKLLGSS

SEQ ID NO: 11612 - protein, 426 aa, Aspergillus nidulans FGSC A4
MLKNVLRRGALRLVRQRASYATSALTPQQKQIVKATIPALEQHGVTITTLFYKEMLERHPELNNIFNSSHQATGVQPAALAHAVWAYASNIDHPEALATAVSRIGHKHASLGVRSEHYPIVGEHLLRAIKKVLGDAVTPPVADAWTAAYQQLADIFISFEDDLYKQATQTPGGWTGWRKFVIADKVHESEEIISFQLVPQDNGRLPTYKPGQFVSVRCFVPELGVYQPRQYSLSDIPNQRYFQISVKKEFASGARPAGRISNVLHESLPKGSEVEISMPFGDFVLDTNATTPVVLMSGGVGLTPMMSMLKTVTNNSKSRPAVFVHAVRNGRVHAMKETLANIMTDNPQVKRAIFYEQVEEGDKQGVDYDYVGRVDVSKIKDLVFLPDADYYICGPSPFMKAQSEALETLGVRPDRIHMEVFGSPTP

SEQ ID NO: 11613 - protein, 127 aa, Streptomyces avermitilis MA-4680
MPTGKVKWFNSEKGFGFLSRDDGGDVFVHSSVLPAGVEALKPGQRVEFGVVAGQRGDQALSVVLLDPTPSVAAAQRRKPDELASIVQDLTTLLENITPMLEKGRYPEKTSGKKIAGLLRAVADQLDV

SEQ ID NO: 11614 - protein, 425 aa, Vibrio vulnificus CMCP6
MSDDNSQQMTPEEVLRQQALDYHALPTAGKIAVALTKPAETAKDLALAYSPGVAEPVREIAQNPDNVYKYTSKGNMVAVISNGTAILGLGNLGPLASKPVMEGKALLFKRFAGLDSIDIEVKHRTIDEFVDTVANIADTFGGINLEDIKAPDCFEIEKRLIERCDVPVFHDDQHGTAIVTAAGMLNAIELQGKKLNECIIVCLGAGAAAVACMELLIKCGAMREKIYMLDRKGVIHTRRDDLNEYKQLFANNTDKRTLEDVISGADLFLGVSGPNLMPAEALKLMADKPVVFACSNPDPEIKPELAHEVRSDLIMGTGRSDYPNQVNNVLCFPFIFRGALDVRASEINDEMKLAAVEAIRQLAKEPVPEAVLKAAGVESLSFGPQYIIPKPMDSRLLPRVAKAVAQAAVDTGVARIPMPENYMAE

SEQ ID NO: 11615 - protein, 513 aa, Hordeum vulgare
MDGNNRGGGHSEVLKNYNLGKTLGLGTFGDVKVAERNVTGQRVAIKILNRRKMETMEMEEKGNREIKIMRLFIDFIHPHIIRVYEVIETPKDIFVVMEYCNNGELLDYIIENGRLQEDEARRIFQQILAGVEYCHRIMVVHRDLKPENLLLDSRYNVKLADFGLSNVMRDGHFLKTSCGSLNYAAPEIISSKLYAGPEVDVWSCGVVLYALLCGSVPFDDDNIPSLFRKIKGGTYILPSYLSDSARDLIPKLLNIDPMKRITFHEIRVHPWFKNHLPCYLAVPPPYKEQQAKMIDEDILREVVNLGYDKDHVCESLWNRLQNEETVAYYLLLDDRFRSTSGYLGADHQHLMDRSFNEFTLSESASPSTRNYLPGINDSQGGGLRPYYPVQRKWAIGLQSGAHPRDIMIEVLKALKELNVCWKKNGLYNMKCRWCPGFPQVSDMLLDSNHNFVDDSTIMDNGNADGRLPAVVKFEIQLYKTKDNKYLLDIQRVTGPQLLFLEFCGAFLTNLRVL

SEQ ID NO: 11616 - protein, 195 aa, Triticum aestivum
HASAHASAHAFADAWVQLCKHFQFDWPVNHTSLSPDGKLVVIVGDDPNGLLIDANSGKTLHSMKGHHDFSFASAWSPDGRTFATGNQDKTCRIWDARNLSKAVHVLKGNLGAIRSIRFTSDGQFLSMAEPADFVHIFDVKSDYNRRQELDFFGEISGMSFSPDTDALFVGVWDRTYGSLLQFGRLYNNWYHDSML

SEQ ID NO: 11617 - protein, 348 aa, Treponema denticola ATCC 35405
MSIKIRTAAVTGPHKVEILELNTPDLRSGEVLVKVHAVALCTLEQRIFRGEIPMPLPCTGGHEVSGEVVALGDGVNTKKWSAGDRVAVRLLYNCGECHYCHSGHNNLCERAQKKPVRENLLVGPGGLCDYIIVNTSALFPISDELSYEEACLTEPLACCVHSIERANLQLGEDVVVIGGGIMGQYHIMLAKCRGCRVILSEVDPERCKLGKQLGADIVFNPLEHDPVTFIQSLTNGRGADAVFNTTPIPGVVPQAIAMTGKCGRMIQYSSMHPDSPTPVSPQMLHGSEIVLTGAISPDERNFYTANRLLSTGIINCKPLIAKKFPFEEAQKAFEAAIVPGTFRMIITD

SEQ ID NO: 11618 - protein, 296 aa, Spiroplasma kunkelii
MTTNIHWFPGHMAKAIKQIDEQSKLIDLIIEIVDSRIPFSSSNPLVDNLRGLKPKLIILNKKDLADPVAIKAWFKYYQSQQIAVLPLDSKHGNITKLIIEKIYFVLAGKIERNQNRGIKSPKLKVMVIGIPNVGKSTFINALIKRNSTRVGNKPGVTKGQQWLKLNHQIDLVDTPGILWPKINDPQVAINLAFIRSIKEDILPKEEICLAAIKWMHKYYFSLLVKQYHLLPSDNFDVTDEQKLFELLLVMQKNRFHKVDEDNVNNIVTDFLNNLWNNKFGLMSFEFPPGKRTINYE

SEQ ID NO: 11619 - protein, 304 aa, Candida parapsilosis
MSLAGKEFKLSNGNKIPAVAFGTGTKYFKRGHNDLDKQLIGTLELALRSGFRHIDGAEIYGTNKEIGIALKNVGLNRKDVFITDKYNSGNHTYDGKHSKHQNPYNALKADLEDLGLEYVDLYLIHFPYISEKSHGFDLVEAWRYLERAKNEGLARNIGVSNFTIENLKSILDANTDSIPVVNQIEFSAYLQDQTPGIVEYSQQQGILIEAYGPLGPITQGRPGPLDKVLSKLSEKYKRNEGQILLRWVLQRGILPITTTSKEERINDVLEIFDFELDKEDEDQITKVGKEKTLRQFSKEYSKYD

SEQ ID NO: 11620 - protein, 250 aa, Capsicum annuum
MGKSYPTVSAEYLKAVDKCKRKLRALIAEKNCAPIMLRLAWHSAGTYDVCSKTGGPFGTMRFRAEQAHGANNGIDIAIRLLEPIREQFPTLSYADFHQLAGVVAVEVTGGPDVPFHPGREDKPEPPVEGRLPDATKGSDHLRDVFVKQMGLSDKDIVALSGGHTLGRCHKERSGFEGPWTTNPLIFDNSYFKELLSGEKEGLLQLPSDKALLSDPAFRPLVEKYAADEDAFFADYAEAHLKLSELGFAEA

SEQ ID NO: 11621 - protein, 494 aa, Treponema denticola ATCC 35405
METLKYVKKEPYQLFIDGKYIPSENGSIVDVINPVNNLPFAKAYRGTKTDCEKAIAAARKAFDEGPYRKMSAKDRSKLLLKAAQILERRAEELAVIETLECGKNYSACRYWEVPMAIDSFEFFAGKARCLDGKVVPSEYGTLNYVTWNPCGVVGEILPWNGPFLMGCQKVNAILAAGNTVVIKPPSWGVLSMILMASIYEEAGFPSGVVNVVTGSGAEVGNCLVESELVDMVSMTGGVETGREIIAHSAKLVKDIALELGGKSPNIFFEDVDIEQAARFAVYGFTNHAGQICVSGTRILVQRRIYEPFIKAMVETAYKLKPGDGFDPSTTINTLISREHANTVWEYIEKGKKQNARLVCGGNPYSEPLLKKGNFIPPTIFADVTPEMEIFQNEIFGPVACITPFDTEEEAISLANATKYGLAGGVFTKDIKRAIRVADRINSGQIYINNYFSKGMIESPGTGWKESGIGIAGIHKYMISKTVFVETVDNVLLPI

SEQ ID NO: 11622 - protein, 307 aa, Candida parapsilosis
MTQSNLLPKTFRTKSGKEISIALGTGTKWKQAQTINDVSTELVDNILLGLKLGFRHIDTAEAYNTQKEVGEALKRTDVPREDIWVTTKYSPGWGSIKAYSKSPSDSIDKALAQLGVDYVDLFLIHSPFFTTEQTHGYTLEQAWEALVEAKKAGKVREIGISNAAIPHLEKLFAASPSPEYYPVVNQIEFHPFLQNQSKNIVRFCQEHGILVEAFSPLAPLARVETNALAETLKRLAEKYKKTEAQVLLRYTLQRGILPVTTSSKESRLKESLNLFDFELTDEEVNEINKIGDANPYRAFFHEQFKDL

SEQ ID NO: 11623 - protein, 117 aa, Triticum aestivum
MERRAARRSSAHHSRMQMPPAPVGQKQHQQTQTQRRGGSKSCQRTPPPPGCFTIQLLMVFLWVAASLAFLPLVLPPLPPPPLSLLLLPVCLLAVLAALAFVPLDAHSNVVGGGSSCL

SEQ ID NO: 11624 - protein, 404 aa, Escherichia coli
GKKITLQNGKLNVPENPIIPYIEGDGIGVDVTPAMLKVVDAAVEKAYKGERKISWMEIYTGEKSTQVYGQDVWLPAETLDLIREYRVAIKGPLTTPVGGGIRSLNVALRQELDLYICLRPVRYYQGTPSPVKHPELTDMVIFRENSEDIYAGIEWKADSADAEKVIKFLREEMGVKKIRFPEHCGIGIKPCSEEGTKRLVRAAIEYAIANDRDSVTLVHKGNIMKFTEGAFKDWGYQLAREEFGGELIDGGPWLKVKNPNTGKEIVIKDVIADAFLQQILLRPAEYDVIACMNLNGDYISDALAAQVGGIGIAPGANIGDECALFEATHGTAPKYAGQDKVNPGSIILSAEMMLRHMGWTEAADLIVKGMEGAINAKTVTYDFERLMDGAKLLKCSEFGDAIIE

SEQ ID NO: 11625 - protein, 377 aa, Cryptococcus neoformans var. grubii H99
MSFRAPNLIRSTVGRRAGQTLNLRSQVIRRRFATEGGPEITKPSAPRSSNTGYIFAGLGVAAVGAAYYFYGTGRTEHDSTNKADTVVREAVATVEAKTGLRRGKDEYQKVYNRIAETLDKEGYDDGSLAPVLLRLAWHASGTYSKADGTGGSNFATMRFKPEAEHSANNGLHVAREHMEKIKQEFPWISYGDLWTLGGVCAIQESGGPTIPWRPGRIDGYAAQVTPDGRLPDATQAQDHLRFIFNRMGFNDQEIVALSGAHAMGRCHPNRSGFDGPWTFSPVTFSNQYFALLRDEPWQWKKWTGPAQFEDKKTKTLMMLPTDMALVKDKSFKKYVDIYADNEEKFFSDFAKAFSKLIELGVPERQWAGEPWTMATSD

SEQ ID NO: 11626 - protein, 404 aa, Pseudomonas aeruginosa UCBPP-PA14
MGPDVVDVRGLTATGHFTFDPGFMSTASCESKITYIDGDKGVLLHRGYPIEQLAEKSDYLETCYLLLNGELPTAAQKEQFVGTIKNHTMVHEQLKTFFNGFRRDAHPMAVMCGVIGALSAFYHDSLDINNPKHREVSAHRLIAKMPTIAAMVYKYSKGEPMMYPRNDLNYAENFLHMMFNTPCETKPISPVLAKAMDRIFILHADHEQNASTSTVRLAGSSGANPFACIASGIAALWGPAHGGANEAVLRMLDEIGDVSNIDKFVEKAKDKNDPFKLMGFGHRVYKNFDPRAKVMKQTCDEVLQELGINDPQLELAMKLEEIARHDPYFVERNLYPNVDFYSGIILKAIGIPTSMFTVIFALARTVGWISHWQEMLSGPYKIGRPRQLYTGHTQRDFTALKDRG

SEQ ID NO: 11627 - protein, 421 aa, Bradyrhizobium japonicum USDA 110
MKTAKRSPIWHPFTQHALQRDMTKVVRGEGAYLYTEDGRRLIDAISSWWVVTHGHCHPCIVNAIREQAGKLNQVIFAGYTHDPAEQVATELLKVTSPALEHVFFSDSGSTSVEVALKMALGYWRNTGRERTKIVVMQHSYHGDTIGAMSVGSRGIFNAAYGALMFEVTSIPFPARDCEQRALDALENACRNEHPAAFIVEPLILGAGGMLMYSPSVLREMKRICEAFDVLFIADEVMTGWGRTGTLFACEQADVTPDIACYSKGLTAGALPLAVTLCRADIFDAHYSEDRTRTFFHSSSYTANPVACAAAKANLDLWQDQEYRWRLASLARMQEQALAPFRLDSRFANVRRTGTVTAVELNTRDAGYLADIGPRLLAFFQARDLLLRPLGNTIYVMPPYCVTAADLDEIYTAIRDAADLLM

SEQ ID NO: 11628 - protein, 286 aa, Pseudomonas aeruginosa PAO1
MSDYQETLYQGYGQRFSIDNMLHEVRTEHQHLVIFENARMGRVMALDGVIQTTEADEFIYHEMLTHVPILAHGAARRVLIIGGGDGGMLREVAKHKSVERITMVEIDGTVVDMCKEFLPNHSQGAFDDPRLNLVIDDGMRFVATTEERFDVIISDSTDPIGPGEVLFSENFYQACRRCLNEGGILVTQNGTPFMQLEEVRTTAARTDGLFADWHFYQAAVPTYIGGAMTFAWGSTHEGLRRLPLETLRQRFRDSGIATRYYNADIHLGAFALPQYVLQAIGKQDND

SEQ ID NO: 11629 - protein, 165 aa, Escherichia coli B
TANEIAALAFVNTVVATAAAILGWIFGEWALRGKPSLLGACSGAIAGLVGVTPACGYIGVGGALIVGVVAGLAGLWGVTMLKRLLRVDDPCDVFGVHGVCGIVGCIMTGIFAASSLGGVGFAEGVTMGHQLLVQLESIAITIVWSGVVAFIGYKLTDLTVGLRVP

SEQ ID NO: 11630 - protein, 322 aa, Xanthomonas campestris pv. campestris str. ATCC 33913
MTASPSKLAQLRDLSVVVADTGDYDAIKRLKPVDCTTNPTLVKKALDLPVYADLIERELAWGRAHGGEDRNSTINEVADRLTVGVGTMLSELVPGRVSTEVDADLAHDTQATIAKARKFIAMYAERGVSKDKILIKIAATWEGIEAARQLQQEGIDCNLTLIFNRSQALACAEAGVFLISPFVGRILDFFVAKGQTPASIDEDPGVVFVRGVYDEFKRRGSSTVVMGASFRSTAQIEALAGCDRLTISPDLLEKLDADHGDLPRKLSPLNADNAAITPINSDSFATDLAADDMATEKLASGIDTFAKDLEALRKTIADKLAG

SEQ ID NO: 11631 - protein, 407 aa, Thlaspi arvense
YQGVYPVKGNQDRFVVEDIVKFGSPFRFGLEAGSKPEILLAMSCLCKGNPDAFLVCNGFKDAEYISLALLGRKLALNTVIVLEQEEELDLVIDLSQKMNVRPVIGLRAKLRTKHSGHFGSTSGEKGKFGLTTTQIVRVMRKLSQSGMLDCLQLLHFHIGSQIPSTSLLSDGVAEAAQLYCELVRLGAHMKVIDIGGGLGIDYDGSKSGESDLSVAYTLEEYAEAVVASVRFVCDRRSVKHPVICSESGRAIVSHHSVLIFEAVSAVKPMAHHANPDDIQFLLEGNEEARANYEDLYAAVMRGDHESCLLYVDQLKQRCVEGFKDGVLSIEQLASVDGLCEWVLKAIGASDPVHTYNINLSVFTSIPDLWGIEQLFPIVPIHKLDQRPGARGILSDLTCDSDGKIDKF

SEQ ID NO: 11632 - protein, 443 aa, Zea mays
MEDAMAADGKSVLQGRYELGRVLGHGNFGRVHAARDLRTGRSVAVKVVAKDKLERAGMAEQIKREIAVMKMVSHPNIVELHEVMATRSKIYLALELVRGGELFSRIARAGRVREDVARCYFRQLVAAVDFCHGRGVFHRDLKLENLLLDEVGNLKVADFGLSALAGHARSDGLLHTACGTPSYVAPEVLGGKGYDGAKADLWSCGVILYVLLVGSLPFHEDNLMVMYRKMQRGEFLCPPWVSADARKLIGELLDPDPSTRITVARLVETPWYRKPLPVLPPLNLKEPTPDARRATSDKEEPEVLNAFHLISFSEGFDLSPLFDQGRGGGVGRSSAGGIRFVTREAASSVVSRLESLVTGRGANMRVTKSGSRGVRLEAVSRGRSGARLAVAAEIFSVAPSVLLVDVKKDGGDTMEYRSFCCEELRPALKDIVWASSQDTPGAA

SEQ ID NO: 11633 - protein, 423 aa, Chlamydophila pneumoniae TW-183
MDKQSSGNSGCIWHPFTQSALDSTPIKIVRGEGAYLYAESGTRYLDAISSWWCNLHGHGHPYITKKLCEQAQKLEHVIFANFTHEPALELVSKLAPLLPEGLERFFFSDNGSTSIEIAMKIAVQYYYNQNKAKSHFVGLSNAYHGDTFGAMSIAGTSPTTVPFHDLFLPSSTIAAPYYGKEELAIAQAKTVFSESNIAAFIYEPLLQGAGGMLMYNPEGLKEILKLAKHYGVLCIADEILTGFGRTGPLFASEFTDIPPDIICLSKGLTGGYLPLALTVTTKEIHDAFVSQDRMKALLHGHTFTGNPLGCSAALASLDLTLSPECLQQRQMIERCHQEFQEAHGSLWQRCEVLGTVLALDYPAEATGYFSQYRDHLNRFFLERGVLLRPLGNTLYVLPPYCIQEEDLRIIYSHLQDALCLQPQ

SEQ ID NO: 11634 - protein, 407 aa, Thellungiella salsuginea
YQGVYPVKGNQDRFVVEDIVKFGSPFRFGLEAGSKPEILLAMSCLCKGNPDAFLVCNGFKDAEYISLALLGRKLALNTVIVLEQEEELDLVIDLSQKMNVRPVIGLRAKLRTKHSGHFGSTSGEKGKFGLTTTQIVRVMRKLSQSGMLDCLQLLHFHIGSQIPSTSLLSDGVAEAAQLYCELVRLGAHMKVIDIGGGLGIDYDGSKSGESDLSVAYTLEEYAEAVVASVRFVCDRRSVKHPVICSESGRAIVSHHSVLIFEAVSAVKPMAHHANPDDIQFLLEGNEEARANYEDLYAAVMRGDHESCLLYVDQLKQRCVEGFKDGVLSIEQLASVDGLCEWVLKAIGASDPVHTYNINLSVFTSIPDLWGIEQLFPIVPIHKLDQRPGARGILSDLTCDSDGKINKF

SEQ ID NO: 11635 - protein, 154 aa, Brassica napus
ESAQSQFWVVDAQGLITEGRDNIDPEALPFARKTKEMERQGLKEGASLVEVVREVKPDVLLGLSAVGGLFSKEVLEAMKGSTSTRPAIFAMSNPTKNAECTAQEAFSILGDNIIFASGSPFKNVDLGNGHVGHCNQGNNMYLFPGIGLGVLLSG

SEQ ID NO: 11636 - protein, 261 aa, Triticum aestivum
GRDVSSHGEGLPHVSEDYLKAVDKAKRKLRGLIAEKNCAPLMLRLAWHSAGTFDVATKTGGPFGTMKCPAELAHGANAGLDIAVRLLEPIKEQFPILSYADFYQLAGVVAVEVTGGPEVPFHPGRQDKPEPPPEGRLPDATQGSDHLRQVFSTQMGLSDQDIVALSGGHTLGRCHKERSGFEGAWTANPLIFDNSYFTELLCGEKEGLLQLPTDKTLLTDPAFRPLVDKYAADEDAFFADYAEAHLKLSELGFGEAVEGCC

SEQ ID NO: 11637 - protein, 407 aa, Nasturtium officinale
YQGVYPVKGNQDRFVVEDIVRFGSPFRFGLEAGSKPEILLAMSCLCKGSPDAFLVCNGFKDAEYISLALLGRKLALNTVIVLEQEEELDLVIDLSQKMNVRPVIGLRAKLRTKHSGHFGSTSGEKGKFGLTTTQIVRVVSKLSQSGMLDCLQLLHFHIGSQIPSTSLLSDGVAEAAQLYCELVRLGAHMKVIDIGGGLGIDYDGSKSGESDLSVAYSLEEYAEAVVASVRFVCDRRSVKHPVICSESGRAIVSHHSVLIFEAVSADKPMVHQATPDDIQFLLEGNEEARANYEDLYAAVMRGDHESCLLYVDQLKQRCVEGFKEGVLSIEQLASVDGLCEWVLKAIGASDPVHTYNINLSVFTSIPDLWGIEQLFPIVPIHKLDQRPGARGILSDLTCDSDGKINKF

SEQ ID NO: 11638 - protein, 464 aa, Clostridium perfringens str. 13
MLFGKNELGSQFETPIFGTVESNESIPKYELAKKSIAPQVAYRLIKDDLLDEGNARQNLCTFCQTYMDDEAVKLMAETLEKNAIDKSEYPQTTDLENRCVNILADLWHAPKDESFMGTSTVGSSEACMLGGMAMKFRWRNRAKALGMDVTSRKPNLVISSGYQVCWEKFCVYWDIEMRLVPMDEEHMSINVDKVLDYVDDYTIGVVGILGITYTGKYDDIKALDKKLEEYNKTAKLTVPMHIDAASGGMFAPFIEPELEWDFRLKNVVSISTSGHKYGLVYPGIGWVLWRDKEYLPQELVFDVSYLGGKIPTMAINFSRSASQIIGQYYNFLRYGFEGYRQIHQRTKDVAMFLASELEKTGLFQIYNNGENLPIVCYKLRDDVNVDWTLYDLADRLLMKGWQVPAYPLPADLQDTIIQRIVCRADLSHNLAELYLRDLKAAIEDLNNARVLNQKSKTGVQGFTH

SEQ ID NO: 11639 - protein, 157 aa, Musa acuminata
MAGESCNLDKDEAEIFKPSPSSSPSPSPPSPPSSSQPPPPSSVLLKPSEESGIQRPEIPESPPAPTITFAASSTPKLDEEPSNPGEESPAPVRFSNRCSACRKKVGLTGFRCRCGDLFCGRHRYSDAHECSFDYKAAGREEIAKANPVIKAAKIIKI

SEQ ID NO: 11640 - protein, 236 aa, Rickettsia sibirica 246
MIDYTKTLTAASKNKTFDEGLRQYMLKVYNYMALALLLTGVAAVTTISVEPIYNLMFQTGFGTIIMFAPLGIALYFFMGFGQMNLPTAQILFWVYAGLTGMSLAYLALIYTGASIARTFFICSSVFGAMSLYGYSTSRDLTSMGSFFAMGLIGLIIASLVNLFLKSSALSFATSLIGIVIFMGLIAWDTQKIKSMYYMAGNDEVGQKLSIMAAFTLYLDFINLFLYLMRFLGNRRD

SEQ ID NO: 11641 - protein, 335 aa, Burkholderia fungorum LB400
MKLLIVSALGVATSIAFATSGAHAQRAPASVNDGIATVVAKRQQSLVGTRDFIDRRAAFEKLMAQVPVPDGVTIHHVDANGVPGKWVSLNHARVSGTHGRRVILYLHGGGFYSGSSNSHRALAATLARDAGADVLLPDYRRMPEARYPAQIDDAVTSYEWLLKQGYFASDIAVAGESAGGNLVLELALRLRAAHRPLPSSLVAMSPIMDLTASGDSTRTLASLDPVLTRAGLLDVTKVYMQGADPRSPDASPLFADLHGLPPLLLQVGAREILLDDSLRIARVAALDDVAVSVEVWPGMVHQWQLFPDVVPEARRALRNCAEFIDAHMARVATTQ

SEQ ID NO: 11642 - protein, 176 aa, Triticum aestivum
  misc_feature (25)..(25): Xaa can be any naturally occurring amino acid
MAPTVMASSATSVAPFQGLKSTAGXLPSAAAPTAASLGSVSNGGRIRCMQVWPIEGIKKFETLSYLPPLSTEALLKQVDYLIRSKWVPCLEFSKVGFIFREHNASPGYYDGRYWTMWKLPMFGCTDATQVINEVEEVKKEYPDAYVRIIGFDNMRQVQCVSFIAFKPPGCEESGKA

SEQ ID NO: 11643 - protein, 267 aa, Corynebacterium glutamicum ATCC 13032
MVATSQFIDDSEAAQAVRAAIVAGYRNIDTALAYGNERGVGEGIRTAGVPREELFISTKLAAEIKDYDGAVAAIDESLAKIGLDYVDLMLIHSPQPWSDFRGGDYSEGNREAWRALEDAYKAGKIRSIGVSNFLEADLENILDSATVAPHVNQLLVHVGNTPSELISFCDSKGILVEAYSPIAHGEMLKNQQVKAIADKYNVSIPQLCIRYTIQLGTVSLPKTANPDHMSSNAQIDFEISEEDMAALQEVTARDYGEHSGFPVYSGK

SEQ ID NO: 11644 - protein, 500 aa, Beta vulgaris subsp. vulgaris
MSMPIPSRQLFIDGEWREPIKKNRIPIINPSNEEIIGDIPAGSSEDIEVAVAAARRALKRNKGREWAATSGAHRARYLRAIAAKVTERKDHFVKLETIDSGKPFDEAVLDIDDVATCFEYFAGQAEAMDAKQKAPVTLPMERFKSHVLRQPIGVVGLITPWNYPLLMATWKIAPALAAGCTAVLKPSELASITCLEFGEVCNEVGLPPGVLNIVTGLGPDAGAPLAAHPDVDKVAFTGSSATGSKVMASAAQLVKPVTLELGGKSPIIVFEDVDIDQVVEWTMFGCFWTNGQICSATSRLLVHESIAAEFIDRLVKWTKNIKISDPFEEGCRLGPVISKGQYDKIMKFISTAKSEGATILCGGSRPEHLKKGYFIEPTIISDISTSMQIWREEVFGPVLCVKTFSSEDEALELANDTEYGLASAVFSKDLERCERVSKLLESGAVWVNCSQPCFVHAPWGGIKRSGFGRELGEWGIENYLNIKQVTSDISNEPWGWYKSP

SEQ ID NO: 11645 - protein, 311 aa, Zea mays
MLGCRKADPDLEAGRPSIQVVRASEPTIRLLFVFVLSLPSCRSPAPSSPLRRPSCETLARRAREKLAAMFGYRKADPDLEAGGSSLLYPGMTESPELRWAFVRKIYVILAVQLAMTAAVSAFVVKVPAVSNFFVSSNAGVALYIFLIILPFLVLCPLRYYHQKHPVNLLLLGLFTVAISFAVGMTCAFTSGKIILEAAILTAVVVISLTAYTFWAAKRGHDFNFLGPFLFAAIMVLMVFSLIQIFFPLGKISVMIYGGLASLIFCGYIIYDTDNVIKRYTYDEYIWAAVSLYLDVINLFLSLLQLLRAADS

SEQ ID NO: 11646 - protein, 588 aa, Zea mays
  misc_feature (394)..(394): Xaa can be any naturally occurring amino acid
  misc_feature (560)..(560): Xaa can be any naturally occurring amino acid
  misc_feature (572)..(572): Xaa can be any naturally occurring amino acid
MCGILAVLGCSDCSQARRARILACSRRLKHRGPDWSGLYQHEGNFLAQQRLAIVSPLSGDQPLFNEDRTVVVVANGEIYNHKNVRKQFTGAHSFSTGSDCEVIIPLYEKYGENFVDMLDGVFAFVLYDTRDRTYVAARDAIGVNPLYIGWGSDGSVWMSSEMKALNEDCVRFEIFPPGHLYSSAAGAGFRRWYTPHWFQEQVPRTPYQPLVLREAFEKAVIKRLMTDVPFGVLLSGGLDSSLVASVTKRHLVKTDAAEKFGTELHSFVVGLEGSPDLKAAREVADYLGTTHHEFHFTVQDGIDAIEEVIYHDETYDVTTIRASTPMFLMARKIKSLGVKMVLSGEGSDELLGGYLYFHFAPNREELHRETCRKVKALHQYDCLRANKATSAWGXEVRVPFLDKEFVDVAMGMDPEWKMYDKNLGRIEKWVLRKAFDDEEHPYLPEHILYRQKEQFSDGVGYNWIDGLKAFTEQQVTDEMMNSAAQMFPYNTPVNKEAYYYRMIFERLFPQDSARETVPWGPSIACSTPAAIEWVEQWKASNDPSGRFISSHDSAATDRTXTSWRWSTATGTXANGTVNGNDVAVAIAV

SEQ ID NO: 11647 - protein, 494 aa, Salmonella enterica subsp. enterica serovar Typhi Ty2
MSDVTLLAEVTTFLRQRHGQFIAGERQAGNGTNFSVTNPATGKIIADVVSTTPAQAKEAMQSARRAFDVWRKMPTLQRGALLLKLADTLAAHREELAQLESVCSGKTIMLSRGLELDQSVAFLRYFAGWAGKITGETLNVSLPSMGEERYTAFTQRQPIGVVVGIVPWNFSIMIAIWKLAAALVCGCTIVIKPSEYTPLTLLRVAELAKEAGFPDGVINVVNGAGGEIAQQLIAHPDCAKVSFTGSVATGEKVRRSATSSGKRVTLELGGKNAALFLNDLTAQAMVNGILEAGYLNQGQICAAAERFYLPQEKLDTVMTLLRQRLSEIVPGSPLDEKTVMGPLANQVQLEKVLRLIQRAREEGDTIVYGGETLPGEGYFLQPTAVKVRSKNSTLMHEETFGPVCSFIGYQNEKEALSHINDSPFGLAASVWSENISKALRYAEDIDAGMVWVNMHTFLDPAVPFGGMKGSGIGREFGSAFIDDYTELKSVMVRY

SEQ ID NO: 11648 - protein, 441 aa, Pseudomonas syringae pv. tomato str. DC3000
MALTREQQIAALEKDWAENPRWKNVTRTYSAADVVRLRGSVQPEHTFARLGADKLWNLVTQGARPSFRPDKDFVNCMGALTGGQAVQQVKAGIQAIYLSGWQVAADNNSAESMYPDQSLYPVDSVPTVVKRINNSFRRADQIQWKAGKTPGDEGYIDYFAPIVADAEAGFGGVLNAYELMKNMIEAGAAGVHFEDQLASVKKCGHMGGKVLVPTQEAIQKLVAARLAADVAGVPTIILARTDANAADLLTSDCDPYDKAFVTGERTHEGFYKVRAGLDQAISRGLAYAPYADLIWCETAKPDLDEARRFAEAIKKEYPDQLLSYNCSPSFNWKKNLDDATIAKFQRELSAMGYKHQFITLAGIHNMWYSMFNLAHDYARNDMTAYVKLQEQEFADAAKGYTFVAHQQEVGTGYFDDMTTVIQGGVSSVTALTGSTEEEQFH

SEQ ID NO: 11649 - protein, 160 aa, Triticum aestivum
  misc_feature (2)..(2): Xaa can be any naturally occurring amino acid
  misc_feature (7)..(7): Xaa can be any naturally occurring amino acid
  misc_feature (10)..(10): Xaa can be any naturally occurring amino acid
  misc_feature (17)..(17): Xaa can be any naturally occurring amino acid
  misc_feature (22)..(22): Xaa can be any naturally occurring amino acid
  misc_feature (24)..(24): Xaa can be any naturally occurring amino acid
  misc_feature (37)..(37): Xaa can be any naturally occurring amino acid
  misc_feature (45)..(45): Xaa can be any naturally occurring amino acid
  misc_feature (69)..(69): Xaa can be any naturally occurring amino acid
  misc_feature (72)..(72): Xaa can be any naturally occurring amino acid
  misc_feature (76)..(76): Xaa can be any naturally occurring amino acid
  misc_feature (94)..(94): Xaa can be any naturally occurring amino acid
  misc_feature (118)..(118): Xaa can be any naturally occurring amino acid
  misc_feature (132)..(132): Xaa can be any naturally occurring amino acid
  misc_feature (139)..(139): Xaa can be any naturally occurring amino acid
  misc_feature (151)..(151): Xaa can be any naturally occurring amino acid
MXPTVMXSSXNSVAPFXGLKSXAXLPVSRRSNGASLXSVSNGGRXRCMQVWPIEGIKKFETLSYLPPLXTEXLLKXVDYLIRSKWVPCLEFSKXGFIFREHNASPGYYDGRYWTMWKXPMFGCTDATQVINXVEEVKKXEYPDAYVRINRXSTTMRQGAV

SEQ ID NO: 11650 - protein, 493 aa, Thermoplasma volcanium GSS1
MDGKLYIDGQWVDSSNGDTLTKYNPVTGEVIGKFAAASRDDVDRAFDAAEDAFQKWMDLGSVERSKIIYKAKELIEENRKELENIIIQENGKPVKEAAEEVDGVLDQMQYYAEWARKLNGEVVEGTTNHRKIFQYKVPYGTVVALTPWNFPAGMVARKLAPALLTGNTVILKPSSDTPGSAEWIVKKFIQAGVPKGALNYITGRGSVIGDYIVEHKKVALITMTGSTSTGQRIMQKASANMAKLMLELGGKAPFMVWKDADINNALKTLLWAKYWNAGQSCIAAERLYVHEDIYDTFINKFVELSKKIVVGDPSRADMGPLINTTALKGTEEVVEEAKESGARILYGGSKPDLSGPYKNGYFFLPTIIDNVDQKSKIFQEEIFAPVIGARKVSDVEEMYSLANDSKYGLASYLFTKDPNLIFEAAERIRFGELYINMPGPEASQGYHTGFRLTGQAGEGSRYGILEYLKIKNIYVDYSGKPLQINTVRDDLFQ

SEQ ID NO: 11651 - protein, 404 aa, Escherichia coli
GKKITLQNGKLNVPENPIIPYIEGDGIGVDVTPAMLKVVDAAVEKAYKGERKISWMEIYTGEKSTQVYGQDVWLPAETLDLIREYRVAIKGPLTTPVGGGIRSLNVALRQELDLYICLRPVRYYQGTPSPVKHPELTDMVIFRENSEDIYAGIEWKADSADAEKVIKFLREEMGVKKIRFPEHCGIGIKPCSEEGTKRLVRAAIEYAIANDRDSVTLVHKGNIMKFTEGAFKDWGYQLAREEFGGELIDGGPWLKVKNPNTGKEIVIKDVIADAFLQQILLRPAEYDVIACMNLNGDYISDALAAQVGGIGIAPGANIGDECALFEATHGTAPKYAGQDKVNPGSIILSAEMMLRHMGWTEAADLIVKGMEGAINAKTVTYDFERLMEGAKLLKCSEFGEAIIE

SEQ ID NO: 11652 - protein, 1080 aa, Candida albicans SC5314
MYATAHTIKQQQQQQQQHPPPPLNGGLHASGAPPNSHEAAAIAQQQQQQQQHHNGPGMIVAAAAASANQQAVQARAQQQQQQQQQRLPSSAALNETTVSTWLAIGSLAESLGDIERATASYNSALRHSPNNPDILVKIANTYRSKDQFLKAAELYEQALNFHVENGETWGLLGHCYLMLDNLQRAYAAYQRALFYLENPNVPKLWHGIGILYDRYGSLEYAEEAFVRVLDLDPNFDKANEIYFRLGIIYKHQGKLQPALECFQYILNNPPHPLTQPDVWFQIGSVYEQQKDWNGAKDAYEKVLQINPHHAKVLQQLGCLYSQAESNPSTPANGAAPPHKPFQQDLTIALKYLKQSLEVDQSDAHSWYYLGRVEMIRGDFTAAYEAFQQAVNRDARNPTFWCSIGVLYYQISQYRDALDAYTRAIRLNPYISEVWYDLGTLYETCNNQISDALDAYRQAERLDPNNPHIKARLEQLTKYQQEGNTHPPQPPPSSQQPRLPQGMVLESTQQQQQQQPPPPPQQQQQQLQHQSQSQPQPQQPPQTQSQPSLLQHQSSLPPQQIQPLHQQAAKPLVNQQQSPPPPHLMNLGQPGQQPQQLPPHLPPHTQQPSQIQEKPPTQEQPHYQPPPPPQHQQQSQSQPQPPHQPQHTQNQSPQLAQLPPHHSNPPAKPHGAPQQRTGLPDLLHNSANIISAPSQVPQPQQQYQQPHIAPVRQEQVNHVPSIYSAPRPTETTLPQINNPNESTTTQVPQLKKEEPKPEATVSAPVPEAIKVQDQVTIQESAPAAAAAVSAPASAPVGDIKTDTVSTTTPATSTTADAVPVSVSQVGEAPNVVQEKKVPDTEQIVSQVEKPVESQPEVTPAPTPAPALATAPTEPAPTDKDVVMAPSKSATPVPQSIVEQNTRVSEATKAPESNGKHDLEDKNDEEKILKRPTVETTTESVPVNQPVEKENEKVEVPPPSEQPSSEKREKEVNGSIKKPLENESKVDIPQFSSNITAQNEEAKSGEETKKDTTKTSPAKQGEVKEVIPSSTETVSKPDVEKDNKEKDKDEDEVMADEDDVKKDENPEPPMRKIEEDENYDDE

SEQ ID NO: 11653 - protein, 372 aa, Glycine max
MAPSLETSNGEAMHLKQVEEEQDGILFAMNMMSTMVYPFVVRTAIELGIFDIIAKAGEGAKLSAEEIIEQLGTKNPEAPTMLDRLLRLLASHSMLSSSLDTEDLQHGQNSPKRLYSLTYASKYFVTDADGVSFGATLNLLLDKVFLESWTELKGAILEGGVAFNRVHSMHSFEYPAVDPRFNDVFNKAMFNLTTIVMKRVLEFYEGFKNINRLVDVGGGLGINLNLITSKYPHVQGVNFDLPHVIEHAPTYPGIEHVGGDMFESVPNGDAIFMKWILHDWSDEQCLKLLKNCHKAIPSDGKVIVVDLILPILPESTVTAKSGFQADLLMMTQNSGGKERTQHEFMELALSSGFSGIKIVCSVSGFWVMEFYK

SEQ ID NO: 11654 - protein, 119 aa, Triticum aestivum
TPSKAKYRRETDSEQVPRGKDEKDFEKRVKECLKLPGGKRMGHNEMTVPLTSAAIREVDVVGIFRYKDTWPLCLEFLRSGKIDVKPLITHRFGFSQGEVEEAFEVSARGRDAIKVMFNL

SEQ ID NO: 11655 - protein, 493 aa, Bordetella bronchiseptica RB50
MQDSQDNGQSGLAAMWIGGRETLAQDGQTIEIANPATRQPLARVPRGRQAEVDLAVAAASQAYAGWRACSPRERADALLRIADSLAAESEALARLLATETGNALRTAARPEAQGAAGIFRYYAGVAGEAKGETVPGAEGTLAYSVREPLGVVAAIIPWNSPVAAAAVKIASAIAVGNTIVVKTAEDAPLSALKLAALCNAALPAGVVNCLTGYGSECGAALAMHPGVRKISFTGSTETGKAIMRAAADRIVPVSLELGGKSPSIVYPSANCDWAVDGVMTAMRFTRQSQSCTAGSRLFVHRDIYDDFLRKLAGRLDRLVVGDPLDEATDMGALINQRQHAKVNDYIACGLAEPSARLLAGGPSPGEGRLAQGYFALPTLIAGVDNGWRVAREEIFGPVLVAIPWSDERQVLEMANDTHYGLAAYVWTTDLGEAMRGASALDAGWIQVNRGHAPGVGVSFGGVKNSGFGREFSLEGMLDSFTQRKSVTLDFSHA

SEQ ID NO: 11656 - protein, 405 aa, Arabis drummondii
YQGVYPVKCNQDRFIIEDIVEFGSSFRFGLEAGSKPEILLAMSCLCKGNPEAFLVCNGFKDSEYISLALFGRKLELNTVIVLEQEEELDLVIDLSQKMNVRPVIGLRAKLRTKHSGHFGSTSGEKGKFGLTTIQILRVVRKLRQVGMLDCLQLLHFHIGSQIPSTALLSDGVAEAAQLYCELVRLGAHMKVIDIGGGLGIDYDGSKSGESDLSVAYSLEEYAAAVVASVRFVCDQKSVKHPVICSESGRAIVSHHSVLIFEAVSAGQQHDTPTDVQFMLEGYSEEVRGDYENLYGAAMRGDRESCLLYVDQLKQRCVEGFKEGSLSIEQLAGVDGLCESVIKAIGASDPVLTYHVNLSVFTSIPDFWGIDQLFPIVPIHKLDQRPVARGILSDLTCDSDGKMDKF

SEQ ID NO: 11657 - protein, 142 aa, Brassica napus
MRSPISRFVSRSILFLHRATPLTAATRHLCAVASPEARTKKLDRIADELLKLNRIELYDYSILFSHKLGLNRYGSSVSVNAGDLPAGASASAETKAAEKTAFDVKLEKFEAASKIKVIKEIRAFTELGLKEAKELVEKAPVV

SEQ ID NO: 11658 - protein, 182 aa, Trichoderma atroviride
  misc_feature (56)..(56): Xaa can be any naturally occurring amino acid
QRQAEGKPTDKPNIIMSSAVQVCWEKAARYFEVEEKYVYCTPDRYTIDPQQAVDLXDENTIGIAAILGTTYTGHYEDVKGINDLLEEKGLDVSIHVDAASGGFVAPFVLPDLEWDFRLPRVVSINASGHKYGLVYPGVGWVVWRSHEYLPQDLIFNINYLGAEQSSFTLNFSKGASQVIGQY

SEQ ID NO: 11659 - protein, 405 aa, Barbarea vulgaris
YQGVYPVKCNQDRFIIEDIVEFGSKFRFGLEAGSKPEILLAMSCLCKGNPEAFLVCNGFKDSEYISLALLGKKLELNTVIVLEQEEELDLVIDLSQKMNVRPVIGLRAKLRTKHSGHFGSTSGEKGKFGLTTIQILRVVRKLRQVGMLDCLQLLHFHIGSQIPSTALLSDGVAEAAQLYCELVRLGANMKVIDIGGGLGIDYDGSKSGESDLSVAYTLEEYAAAVVASVRFVCDQKSVKHPVICSESGRAIVSHHSVLIFEAVSAGQQHETPSDVQFMLEGYSEEVRADYENLYGAAMRGDRESCLLYVDQLKQRCVEGFKEGSLSIEQLAGVDGLCESVIKAIGASDPVLTYNINLSVFTSIPDFWGIDQLFPIVPIHKLDQRPVARGILSDLTCDSDGKIDKF

SEQ ID NO: 11660 - protein, 401 aa, Brassica nigra
YQGVYPVKCNQDRFIIEDIVRFGSSFRFGLEAGSKPEILLAMSCFCKGNPEAFLVCNGFKDSEYVSFALLGRKLELNTVIVLEQEEELDLVIDLSPKMNVRPVIGLRAKLRTKHSGHFGSTSGEKGKFGLTTIQILRVVRNLRQLGMLDCLQLLHFHIGSQIPSTALLSDGVAEAAQLYSELVRLGAHMKVIDIGGGLGIDYDGSKSGESDLSVAYTLEEYAEAVVASVRFVCDQKSVKHPVICSESGRAIVSHHSVLIFEAVSAVKQHANPDDIQFLLEGEEAEYEDLYGAVMRGDRESCFLYVDQLKQRCVEGFKDGSLSIEQLVSVDGLCESVLKAIGASDPVQTYNINLSVFTSIPDFWGIDHLFPIVPIHKQDQRPGARGILSDFTCDSDGKIDKF

SEQ ID NO: 11661 - protein, 487 aa, Gibberella zeae PH-1
MIANPSLQHHHSHDSSSSYRSGSRSRHSTTPRAQRTAAELADFNSNHSSTAWSPATTTATATAPTSESTPTPASAGQTAHVSATGGASRFPSPPPSSSPAAATGPAYADDAKSSSMASDARDSGPLGHASRSGPVSHASAAQQPSPASDDFQISNQAYPLSGGPSQPPEQKVIHIRDLAHIQSLASADLLSGNGGSGILNDPPLQQMKYEISGMPIGDIIEMVAALLTKITTTNDLQHDAMQRNVAHQQQANQSGDSSGSSISSLNHSVLAFHGKNVPAITILSYLSRIHKYCPTTYEVFLSLLVYFDRMTERVNDMVTKNEEIRRQTQSQQTNTKTPQDTPMRGEGMNDTDESDSDLADDDDEEMTDAARQSRPSSNKGAATPTEHPAIAAATYFVVDSFNIHRLIISGVTCASKFFSDVFYTNSRYAKVGGLPLVELNHLELQFLLLNDFRLAVPVEDLEAYATMLVEFYAREVVAKQAGAGSTE

SEQ ID NO: 11662 - protein, 348 aa, Listeria monocytogenes EGD-e
MKALKLYGKRDLRYEEADMPTIEEPDDVILKVKTVGICGSDISRYSKLGPYVPGMVWGHEFSGEVIEVGSEVTDIEIGDRAAGCPALYCGECEYCKKGEFARCRKLTVIGARHPGAYAEYIKLPAENVVKIPNELDYEAAALVEPSAVVVHGFYHTKLQAGDDVVVVGSGNIGLLAIQWAKVFGARRVIAIDVDDKKLALAKEVGADVVINSLKEDPLEVVAAHTDGLNADLVVEAAGSPITSAQVFAYAKKGGGVVFLGIPYADVTIERFYFEKIVRSELTVWGSWNAISAPFPGKEWQTTIHFLANKQINIEPMITHRLSLAEGPEVFERIYERNEFFGKVLFFPE

SEQ ID NO: 11663 - protein, 181 aa, Triticum aestivum
  misc_feature (28)..(28): Xaa can be any naturally occurring amino acid
  misc_feature (68)..(68): Xaa can be any naturally occurring amino acid
  misc_feature (106)..(106): Xaa can be any naturally occurring amino acid
  misc_feature (171)..(171): Xaa can be any naturally occurring amino acid
YSPWAPTVMASSATSVAPFQGLKSTAGXPVSRRSNGASLGSVSNGGRIRCMQVWPIEGIKKFETLSYXCPPLSTEALLKQVDYLIRSKWVPCLEFSKVGFIFREHXRHPPGYYDGRYWTMWKLPMFGCTDATQVINEVEEVKKEYPDAYVRIIGFDNMRQVQCVSFIAFKXPPGCEESGKA

SEQ ID NO: 11664 - protein, 404 aa, Corynebacterium efficiens YS-314
MIGVSRPTPQNSYPGGSTVIVSTKPLTDRSRLSEAHAEMIKATLPLVGSKINDITPVFYNRMFTAHPELLRSTFNRANQKQGDQQKALAASIATFATMLVDPEAPDPVDMLARIGHKHVSLGITADQYNIVHEHLFGAIVEVLGADVVTPPVAEAWDAVYWLMANVLIDLESDLYASNDLAPGDVFRHVTVTGKKQLSDKVWEYTFEGDLVTPAPGQYTSIGVKLPDGARQLRQYSLLSGTDSQYRIAVEDNGEVSTFLRDNVEVGDTIEASVAAGDLVMNDDVNPVVLISQGIGSTPMVGMLNQVAADRHVTVLHADQSEKDHAQREEMVALVGGLANGALYTFYRDADQWLNVAGHIPSDASVYLCGGNEFLQNVRGQLENLEEQPREIRFELFSPNDWLIS

SEQ ID NO: 11665 - protein, 183 aa, Shigella flexneri 2a str. 301
MQDSILTTVVKDIDGEVTTLEKYAGNVLLIVNVASKCGLTPQYEQLENIQKAWADRGFVVLGFPCNQFLEQEPGSDEEIKTYCTTTWGVTFPMFSKIEVNGEGRHPLYQKLIAAAPTTVAPEESGFYARMVSKGRAPLYPDDILWNFEKFLVGRDGKVIQRFSPDMTPEDPIVMESIKLALAK

SEQ ID NO: 11666 - protein, 167 aa, Helianthus annuus
MATQSKKTLYDFTVKDAKGNDVDLSVYKGKVVLIVNVASKCGLTNNSYDELNQIYLKYKEKGFEILAFPCNQFGQQEPGTNEEIVDFVCTKFKSEFPIFDKIDVNGENAAPVYEFLKTGFYGILGGDIQWNFSKFLVDKNGQPVDCYYPTTSPLTVERDIQKLLGLL

SEQ ID NO: 11667 - protein, 233 aa, Zea mays
  misc_feature (161)..(161): Xaa can be any naturally occurring amino acid
  misc_feature (216)..(216): Xaa can be any naturally occurring amino acid
MAQILLHGTLHATIFEAESLSNPHRATGGAPKFIRKLVEGIEDTVGIGKGTTKIYATVDLEKARVGRTRMVSNEPVNPRWYESFHIYCAHMAADVVFTVKIDNPIGASLIGRAYLPVEDILGGDEIDKWLEIRDEKREPIGDSKIRVKLQYFDVGKDRNWXARGVRSTRYPGVPYTFFSQRQGCKVTLYQDAHVPDNFVPRIPLADGKNYEPHRVXWEDIFDAISKGQHLIYI

SEQ ID NO: 11668 - protein, 249 aa, Cucumis sativus
PGKCYPVVSEEYQKAIEKAKRKLRGFIAEKNCAPLMLRLAWHSAGTFCKDSKTGGPFGTMRFKSELAHGANNGLDIAVRLLEPIKEQFPILSYADFYQLAGVVAVEVTGGPDVPFHPGREDKPEPPPEGRLPDATKGSDHLRDVFYTMGLSDQDIVALSGGHTLGRAHKERSGFEGPWTTNPLIFDKSYFTELLTGEKEGLLQLASDKALLSDPVFRPLVEKYAADEDAFFADYAEAHQKLSELGFADA

SEQ ID NO: 11669 - protein, 373 aa, Candida albicans
MSVKTQTITVLPGDHVGTEIVNEPTKVLKAIEAPTPYQKIQFDFKHHLIGGAAIDATGVPLPDDALESAKSSDAVLLGAVGGPKWGTGTVRPEQGLLKIRKELNLYANIRPCNFASDSLLELSPLKAEVVKGTNLIIVRELVGGIYFGERQEQEESEDHQTAWYRPKYTVDEVTRITRMAAFMALQHNPPLPIWSLDKANVLASSRLWRKTVDKVISEEFPALSVQHQLIDSAAMILIQNPTKLSGIIITSNMFGDIISDEASVIPGSLGLLPSASLASLPDTNTAFGLYEPCHGSAPDLPANKVNPIATILSAASMLRLALDCVKETEALEEAVKQVLDSGIRTADLRGTSSTTEVGDAIAETVTKILKQNT

SEQ ID NO: 11670 - protein, 153 aa, Brassica napus
MAPTVMASSATSVAPFQGLKSTAGLPVSRRSNGASLGSVSNGGRIRCMQVWPIEGIKKFETLSYLPPLSTEALLKQVDYLIRSKWVPCLEFSKVGFIFREHNASPGYYDGRYWTMWKLPMFGCTDATQVINEVEEVKKEYPDAYVRIIGFDNM

SEQ ID NO: 11671 - protein, 421 aa, Arabidopsis thaliana
MEKKGSVLMLRYEVGKFLGQGTFAKVYHARHLKTGDSVAIKVIDKERILKVGMTEQIKREISAMRLLRHPNIVELHEVMATKSKIYFVMEHVKGGELFNKVSTGKLREDVARKYFQQLVRAVDFCHSRGVCHRDLKPENLLLDEHGNLKISDFGLSALSDSRRQDGLLHTTCGTPTYCAPEVISRNGYDGFKADVWSCGVILFVLLAGYLPFRDSNLMELYKKIGKAEVKFPNWLAPGAKRLLKRILDPNPNTRVSTEKIMKSSWFRKGLQEEVKESVEEETEVDAEAEGNASAEKEKKRCINLNAFEIISLSTGFDLSGLFEKGEEKEEMRFTSNREASEITEKLVEIGKDLKMKVRKKEHEWRVKMSAEATVVEAEVFEIAPSYHMVVLKKSGGDTAEYKRVMKESIRPALIDFVLAWH

SEQ ID NO: 11672 - protein, 428 aa, Bdellovibrio bacteriovorus HD100
MKALGRHILVEFSGCNAEVLNDVSIIERSMVEAAQIAGATVINSTFHHFSPWGVSGVVVIQESHLAIHTWPEYRYAAVDLFTCGDSVDPWVSFEHLKKAFQANYSALEMNRGSLHVIQKSDFQPKIMREKPSFDLSKGHQIDRNVWFTDKDENQALSLRYTGDVLFDETNPFQRVRVLDSYSHGKFLAINNMVMCTERDEYHYHEMITHPVMQTHGNAKNVLVIGGGDGGTIRELFKYNVDNVTMVEIDEAVVRASKEHLPKIACEFNNPKLNLIIGDGIQFVKDAPANSYDVIIVDGSDPVGPAKGLFTAEFYNNCKNALKDGGLVITQGESPMFHEGTFVELNHCLKGIFGKQSVHTMLFHATTYPSGMWSLQVAVKGSKHPAKDFNKDQAAKFAQDKGLKYYNEDLHTAAFSLPTFVKTMLGDNA

SEQ ID NO: 11673 - protein, 242 aa, Ceratopteris richardii
  misc_feature (8)..(8): Xaa can be any naturally occurring amino acid
  misc_feature (11)..(11): Xaa can be any naturally occurring amino acid
  misc_feature (19)..(19): Xaa can be any naturally occurring amino acid
MLNYSFDXVKXISSSDLIXPAGNYYQHVTFNEQGDLADDDGICYDIINSTGEKKRGLTVDQVKYLEMNFTMDFKLEPERKALIAKELGLRPRQVAIWFQNRRARWKNKQLEQDYETLKSSYEALLQENEDMVKRNKALDEENKLLQAEIARLTGISGNVDVPVDIDAKVASPDLDSDSDLESTVKGEKQQNLKSEIGIPAKLDAQSEILESLTLSCLKSQEAIVAFVEQPIGANDSVVACAL

SEQ ID NO: 11674 - protein, 429 aa, Xylella fastidiosa 9a5c
MSDLDKVTLNAGETSLVLPVLKPTLGNGCVDIAKLTKETGLFTYDSGFTATASCKSAITYIDGEKGVLLYRGYPIEQLAEHSSFLEVAYLLMNGELPRKDEFAKFDDEITHHTMMHESLKNFLGGFHYDAHPMAMLAASVASLSAFYHDTLDLNDLEQRRLAAIRLIAKVPTLAAAAHRYSIGWPIRYPRNNLGYVERFLHMMFEVPSEPLQLNPVVTKALDLLFILHADHEQNASTSTVRLVGSTGANPYASVAAGITALWGPAHGGANEAVLKMLEEIGDAKNVDLVIAKAKTKDKNSPFRLMGFGHRVYKHFDPRAKIIREMAHTVLGELGVNDPLLEVALKLEEAALKDDYFVQRKLYPNVDFYSGIIYKAINIPLEMFTVMFAIARTAGWVSHWLEQQVDPEMKISRPRQIYTGHGERDYKDAR

SEQ ID NO: 11675 - protein, 404 aa, Escherichia coli
GKKITLQNGKLNVPENPIIPYIEGDGIGVDVTPAMLKVVDAAVEKAYKGERKISWMEIYTGEKSTQVYGQDVWLPAETLDLIREYRVAIKGPLTTPVGGGIRSLNVALRQELDLYICLRPVRYYQGTPSPVKHPELTDMVIFRENSEDIYAGIEWKADSADAGKVIKFLREEMGVKKIRFPEHCGIGIKPCSEEGTKRLVRAAIEYAIANDRDSVTLVHKGNIMKFTEGAFKDWGYQLAREEFGGELIDGGPWLKVKNPNTGKEIVIKDVIADAFLQQILLRPAEYDVIACMNLNGDYISDALAAQVGGIGIAPGANIGDECALFEATHGTAPKYAGQDKVNPGSIILSAEMMLRHMGWTEAADLIVKGMEGAINAKTVTYDFERLMEGAKLLKCSEFGDAIIK

SEQ ID NO: 11676 - protein, 256 aa, Ceratopteris richardii
MPFIPATMKHHAALDSTDIKGKSKNSCKDLKSRALKRSRQDVVVDSDTEEKRRGLTMEQINILEMKFKEDVELEPERKTLIAKQLGLRPRQVAIWFQNRRARWKNKQVECKYELLKAQYDAVVKEKESITMEHESILEGNRRLHSESIEKANTLGGAISPALPSCNIMSPTDSADCQSEIIMSVDVIEGAISCCHPIQEPSSRMAADVVVETEYSFYSSLDNSFSQFPMLVRQLIANGHCLQDAYDIYLGCEYFYG

SEQ ID NO: 11677 - protein, 114 aa, Bartonella birtlesii
GGANEACLKMLQEIGSVKRIPEFIARAKDKNDPFRLMGFGHRVYKNYDPRAKIMQKTCHKVLKELNIQDDPLLDIAIELEKIALNDEYFVEKKLYPNVDFYSGITLKALGFQPK

SEQ ID NO: 11678 - protein, 192 aa, Ceratopteris richardii
MAWSVSVGSTSIPQDEDETKQSVITSGISKTKGHNQGHRKHPSKDVTKDIGDGDELMCGVEKKRRLTAEQVNFLETSFSMDLKLEPERKAHLAKQLGIQPRQVAIWFQNRRARWKNQQIEQDYESLKASYEAVVEEKERLLKEHDLALEANKRLQAEIARLTRSLQSYDRNGMSEPKGGTAEQWQIRGNVNQ

SEQ ID NO: 11679 - protein, 112 aa, Bartonella alsatica
ANEACLKMLQEIGSVKRIPEFIARAKDKNDPFRLMGFGHRVYKNYDPRAKIMQKTCHEVLKELNIQNDPLLDIAIELEKIALNDKYFVEKKLYPNVDFYSGITLKALGFPTK

SEQ ID NO: 11680 - protein, 445 aa, Arabidopsis thaliana
MIFRRRRMRRNKSQVSQRASVLFPGCGELNYARETGDVTLEATLRKISSSLEDVVEVPDSPEESYISSSRRTGLACISAQENGSDDEITHDEQVATWSAISKETKSLIHLNGVASVASSHLSGFRAKKSSNGLKDHGRPKFSFNSHTHGETSSKISDMAEIFEPDVEDQAIEEDPIIECPNSFDERSENRQGVSVAESREVLHECTKDAVPKLQEIPLDKIRLIKRSSELDSRHEAKSRKFTHKGNSSNFQDSDTDDELPGPMDSGSSSDDEPSYQSSVPNISNQKKQFVGDRFDEAIKASSLSKEGLLFGSPKLSGGSSLYGKLQQIMKQEKETEMEIMRKLQSGIGEADSSGYVDVKVMSRHLEGKLVVCKCSVIDLSGDSLLLKNTQALAAKETETTIIFSPKVCADVDIEIGNFIRVYAPWSVLIPLFRLLSHVTKLFCDI

SEQ ID NO: 11681 - protein, 440 aa, Glycine max
MMGEKSNSNSGDAINSTLLHGKYELGRLLGHGSFAKVYHARHLNTGKSVAMKVVGKEKVVKVGMMEQIKREISAMNMVKHPNIVQLHEVMASKSKIYIAMELVRGGELFNKIARGRLREETARLYFQQLISAVDFCHSRGVFHRDLKPENLLLDDDGNLKVTDFGLSTFSEHLRHDGLLHTTCGTPAYVAPEVIGKRGYDGAKADIWSCGVILYVLLAGFLPFQDENLVALYKKIYRGDFKCPPWFSSEARRLITKLLDPNPNTRITISKIMDSSWFKKPVPKNLVGKKREELNLEEKIKHQEQEVSTTMNAFHIISLSEGFDLSPLFEEKKREEKELRFATTRPASSVISRLEDLAKAVKFDVKKSETKVRLQGQENGRKGKLAIAADLYAVTPSFLVVEVKKDNGDTLEYNQFCSKELRPALKDIVWRTSPAENPTLA

SEQ ID NO: 11682 - protein, 357 aa, Trichoderma atroviride
MAEFVRAQIFGTTFEITSRYSDLQPVGMGAFGLVCSARDQLTNQNVAVKKLMKPFSTPVLAKRTYRELKLFKHLRHENVISLSDIFISPLEDIYFVTELLGTDLHRLLTSRPLEKQFIQYFLYQIMRGLKYVHSAGVVHRDLKPSNILVNENCDLKICDFGLARIQDPQMTAYVSTRYYRAPEIMLTWQKYDVEVDIWSAGCIFAEMLEGKPLFPGKDHVNQFSIITELLGTPPDDVINTIASENTLRFVKSLPKRERQPLRNKFKNADDSAIDLLERMLVFDPKKRITATEALAHDYLAPYHDPTDEPVAEEKFDWSFNDADLPVDTWKIMMYSEILDYHNVEGVPQMEDQQFPPQ

SEQ ID NO: 11683 - protein, 120 aa, Oryza sativa (japonica cultivar-group)
MAPRCATLAVVVVLVAAVVAPPTAVRAAISCSAVYNTLMPCLPYVQAGGTVPRACCGGIQSLLAAANNTPDRRTICGCLKNVANGASGGPYITRAAALPSKCNVSLPYKISTSVNCNAIN

SEQ ID NO: 11684 - protein, 319 aa, Solanum nigrum
MGSKYSKATNSINDASNSSYRVPFESLRVPFVDLQEATNNFDDKFLIGWGVFGKVYMGVLRNGTKVALKKHMPESSQGIEEFRTEIEILSLCSHPHLVSLIGYCDERNEMILIYEYMENGNLRSHLYGSDLPAMSWEQRLEICIGAARGLHYLHTSAVIHRDVKSINILLDDNFVPKITDFGLSKTGTELDQTHVSTAVKGTVGYLDPEYFIRGQLTEKSDVYSFGVVLFEVLCARPAIAHSHSREMISLAEWAVESHNNGQLEQIIAPNIAAKIRPESLKKFGETVVKCLALSSEDRPSMGDVLWKLEYALRLQESVI

SEQ ID NO: 11685 - protein, 401 aa, Brassica oleracea
YQGVYPVKCNQDRFIIEDIVRFGSSFRFGLEAGSKPEILLAMSCFCKGNPEAFLVCNGFKDSEYVSFALLGRKLELNTVIVLEQEEELDLVIDLSPKMNVRPVIGLRAKLRTKHSGHFGSTSGEKGKFGLTTIQILRVVRNLRQLGMLDCLQLLHFHIGSQIPSTALLSDGVAEAAQLYCELVRLGAHMKVIDIGGGLGIDYDGSKSGESDLSVAYTLEEYAEAVVASVRFVCDQKSVKHPVICSESGRAIVSHHSVLIFEAVSAVKQHANPDDIQFLLEGEEAEYEDLYGAVMRGDRESCFLYVDQLKQRCVEGFKDGSLSIEQLVSVDGLCESVLKAIGASDPVQTYNINLSVFTSIPDFWGIDHLFPIVPIHKQDQRPGARGILSDFTCDSDGKIDKF

SEQ ID NO: 11686 - protein, 123 aa, Zea mays
MVSALRFFTCLVLAVCIVASVDAAISCNTVVGSLGTCYVYLRQGGIVPPSCCRGVRNLNGMAQTTPDRQQACKCVQSFTKSVPGLNQNLASGLPGKCGVSLPYPISISMNCDNVKLSGTHISS

SEQ ID NO: 11687 - protein, 180 aa, Salmonella typhimurium
GSMQTIKCVVVGDGAVGKTCLLISYTTNKFPSEYVPTVFDNYAVTVMIGGEPYTLGLFDTAGQEDYDRLRPLSYPQTDVFLVCFSVVSPSSFENVKEKWVPEITHHCPKTPFLLVGTQIDLRDDPSTIEKLAKNKQKPITPETAEKLARDLKAVKYVECSALTQKGLKNVFDEAILAALE

SEQ ID NO: 11688 - protein, 405 aa, Capsella bursa-pastoris
YQGVYPVKCNQDRFIIEDIVEFGSSFRFGLEAGSKPEILLAMSCLCKGNPDAFLVCNGFKDSEYISLALFGRKLELNTVIVLEQEEELDLVIDLSQKMNVRPVIGLRAKLRTKHSGHFGSTSGEKGKFGLTTIQILRVVRKLRQVGMLDCLQLLHFHIGSQIPSTALLSDGVAEAAQLYCELVRLGAHMKVIDIGGGLGIDYDGSKSGESDLSVAYSLEEYAAAVVASVRFVCDQKSVKHPVICSESGRAIVSHHSVLIFEAVSAGQQHETPTDVQFMLEGYSEEVRGDYENLYGAAMRGDRESCLLYVDQLKQRCVEGFKEGSLGIEQLAGVDGLCESVIKAIGASDPVLTYHVNLSVFTSIPDFWGIDQLFPIVPIHKLDQRPVARGILSDLTCDSDGKIDKF

SEQ ID NO: 11689 - protein, 183 aa, Triticum aestivum
MAGVGRNMVAPLLVLNLIMYLIVIGFASWNLNHFINGLTNRPGVGGNGATFYFLVFAILAGVVGAASKLAGVHHVRTWRGDSLATSASSALVAWAITALAFGLACKEIHIGGYRGWRLRVLEAFVIVLMFTQLLDVLALHSGLFGNQFGGNHAGGYPAEHAYGAGGDPHNKGMGMGTGGVARV

SEQ ID NO: 11690 - protein, 293 aa, Triticum aestivum
  misc_feature (269)..(269): Xaa can be any naturally occurring amino acid
SARGRVTSPQQSFSHQQQPFPQQPYPQQPYPSQQPYPSQQPFPTPQQQFPQQSQQPFTQPQQPTPLQPQQPFPQQPQQPQQPFPQPQQPFPWQPQLPFPQQPQQPFPQPQQPQQQFPQSQQPQQPFPQPQQQFLQPQQPQQSFPQQQQPLIQLSLQQQMNPCKNFLLQQCNPVSLVSSLISMILPRSDCQVMQQQCCQQLAQIPQQLQCAAIHSVVHSIIMQQEQRQGVQIRRPLFQLVQGQGIIQPQQPAQLEVIRSLVLRTLPTMCXVYVSPDCSTINAPFASIVVGIGGQ

SEQ ID NO: 11691 - protein, 143 aa, Saccharomyces cerevisiae
MCRFPRMILATVQKMISEILDQDLMFTKDAREIIINSGIEFIMILSSMASEMADNEAKKTIAPEHVIKALEELEYNEFIPFLEEILLNFKGSQKVKETRDSKFKKSGLSEEELLRQQEELFRQSRSRLHHNSVSDPVKSEDSS

SEQ ID NO: 11692 - protein, 349 aa, Chenopodium rubrum
SKTHFKMTTLETEQEQQPFSQNSPLFLDCLYCEEKYWDYDYHDEDDFGSLNSSKLHDCSLICCEDDEEIQLNALVSKEEKINFDEGDLGGNQLVMETRREALEWMIRVNYHHNFSVITLVLGVNYFDRFMLSFGFQKEMPWMTHLAAVACLSLASKVEETHVPLLLDFQVEHEQIFEAKVVQRMELLVLQHSNGKMNAVTPLSYFGHLIRKLKLKPHFHCKILTRCENIIVSVILDPRFLCYVPSVLAAASMVQTLKEIGLWSILEHQNDIMNTLKLDKVKVEDCYNFIQEVSSNEKARKRKWYNNISSANRNPNNVLELVVSSESSNNDLPSETLPKKCRTMGPPCFG

SEQ ID NO: 11693 - protein, 504 aa, Ralstonia solanacearum GMI1000
MRVSELLSSLSIDGAASVEGGHQVRSPIDGTLIGSVKLVSAKESEAAIERAHAAFLQWRGVPAPVRGELVRLLGVELRRHKEALGRLVTLEAGKLLSEGLGEVQEMIDICDFAVGLSRQLYGLTIASERPGHRMMETWHPVGVVGVISAFNFPAAVWAWNSALAFVCGDSVVWKPSEKTPLTALACDALFRKAVAAFGKAHQGTAPDGLHALIVGGREAGEALVQSKRVPVVSATGSTRMGRLVSARVGERLGRAILELGGNNAMIVAPSADLELATRAITFAAVGTAGQRCTTLRRLIVHESVAANLVERLKRIYGSVTVGNPLQEGTLVGPLIDAGAYAAMARALERADAQGGRVHGGERTHLEAGPEAYYVKPALVEMPAQTEVMQQETFAPILYVLTYRTLDEAIALQNGVPQGLSSAIFTRDLNEAEWFLSAAGSDCGIANVNIGTSGAEIGGAFGGEKETGGGRESGSDAWKAYMRRATNTINYSNRLPLAQGVRFDV

SEQ ID NO: 11694 - protein, 882 aa, Zea mays
MSYTISGGGTAPAAWAWLHGDLELTIHEARGLPNMDLLSTLLRRLCLCPPLAGITPARRRSLSDDDDDSAHAHAHTHPHHHHLRGRLHRRPRRRHEPQPHGHLLLPTSDPYAAVVVAGPHETTVARTYVFRNSEAPRWEASFLLPLAHAATGLEFHVKDADPFGSDLIGVAWLPAAAVLASAAAPIESQWLDLARPDARGPPAPGGGSAIRVSAAFVPAAASRGRSGVGVPAYFPLRRGCDVRLYQDAHVAAGELEGVGVVPGFLPGRCWEDLCMAVLGAQRLVYVAGWSVHTTVRLTREAMSPEMAAKVAELEELGGEPVEHMSLGELLKYKSQEGVRVLLLVWDDRTSHNNFFVKMVVGTLYTHHQKCVLVDTPASESTRRITAFLGGLDLCAGRYDTPSHRLFRDLQTVFHGDVYNPTFGGDVNGPRQPWHDLHCRLDGPAAYDILKNFEQRWRKATKLREMFGGKAAHRKDDALLKLERIPWILSPTKPKQQPPSAAADTGAADHDDDERDQPALHVLPDGDPERWHAQVFRSVDAGSVKRFPRPWERAEMARRHLVGDKNLAVERSIHAAYVAAIRSAERFVYVENQYFIGGSYAWPSYRNGGACNLVPMEIALKVASKVRAGEPFAAYVVLPMWPEGNPGSGPAQEILFWQNQTMEMMYSVVAAALEGKGGHPQEHLNFYCLGNREPAEDAGDGNKWAPADPLDDATTSSAAAHARRHRRFMVYVHSKGMIVDDEYVIIGSANINQRSLAGSRDTEIAVGAYQPDHTGACPRGKVHGYRMSLWEEHLGKEAVRRPEVLRPESPRCVKLVNRIARDNWRRYAADDDKLGPLQGHLLRYPVHVRADGRVEPLPGNELFPDVGGRVVGAPNNLPDYLTM

SEQ ID NO: 11695 - protein, 405 aa, Arabidopsis arenosa
YQGVYPVKCNQDRFIIEDIVEFGSSFRFGLEAGSKPEILLAMSCLCKGNPEAFLVCNGFKDSEYISLALFGRKLELNTVIVLEQEEELDLVIDLSQKMNVRPVIGLRAKLRTKHSGHFGSTSGEKGKFGLTTIQILRVVRKLSQVGMLDCLQLLHFHIGSQIPSTALLSDGVAEAAQLYCELVRLGAHMKVIDIGGGLGIDYDGSKSGESDLSVAYSLEEYAAAVVASVRFVCDQKSVKHPVICSESGRAIVSHHSVLIFEAVSAGQQHETPTDHQFMLEGYSEEVRGDYENLYGAAMRGDRESCLLYVDQLKQRCVEGFKEGSLSIEQLAGVDGLCEWVIKAIGASDPVLTYHVNLSVFTSIPDFWGIDQLFPIVPIHKLDQRPVARGILSDLTCDSDGKIDKF

SEQ ID NO: 11696 - protein, 150 aa, Glycine max
  misc_feature (112)..(112): Xaa can be any naturally occurring amino acid
MAAAFASRCSRVGRSLSGGLSNSSPGLFTSSHGMTCNNLFSQQQRTFIQMRTVLKVVDNSGAKKVMCIQALKGKKGARLGDTIIASVKEAHPNGKVKKGKVVYGVVVRAAMXRLVDKQGQPSGTRVLGPLPHELRQKKHVKIFTLAGHIA

SEQ ID NO: 11697 - protein, 257 aa, Oryza sativa (japonica cultivar-group)
MSPPLELDYIGLSPPVPAAADAAADNDLKGTELRLGLPGSHSPDRSPPAATLDLLPAAKGAKRGFSDEARPLPASAAAAAAAGKGKKAAAGEEDEDAEEEDKKVAAAPQAPAAKAQVVGWPPIRSYRKNTMATNQLKSSKEDAEAKQGQGFLYVKVSMDGAPYLRKVDLKTYKNYKDLSTALEKMFIGFTTGKDGLSESRKDGEYVLTYEDKDGDWMLVGDVPWEMFANSCRRLRIMKGSDAIGLAPRAVDKSKNRN

SEQ ID NO: 11698 - protein, 320 aa, Oryza sativa (japonica cultivar-group)
MEAEAAAKRARESGDAAAAGAGEQAGISAVIPGWFSEISPMWPEAHSLKVEKVLFQGKSDYQNVMVFQSSTYGKVLVLDGVIQVTERDECAYQEMITHLPLCSIKDPKKVLVIGGGDGGVLREVSRHSSVEQIDICEIDKMVVDVSKQFFPHLAVGFEDPRVSLHIGDVAFLKNAPEGTYDAVIVDSSDPPGPAQELFEKPFFQSVARALRPGGVVCTQAESIWLHMHIIEDIVANCRQVFKGSVNYAWTTVPTYPGVIGFMLCSTEGPTVDFQHPIFNIEDNEFSTKSKGPLKFYNSEIHSASFCLPSFAKRVIGSKAN

SEQ ID NO: 11699 - protein, 418 aa, Desulfitobacterium hafniense DCB-2
MSRIKNLREEALEFHKVQPGKLEVRVTVPAQDRDDLTLAYSPGVAEPVKEIAADLENLDIYTNHANYVSIVSNGTAILGLGDLGAAASMPVMEGKSLLFKAFGDVDAFPLCVNTTDVDKIVEIVELTSPTFGGVNLEDIKAPECFEIEEKLKARGIFKGPIFHDDQHGTAVVTLAGLVNALKVVGKKIEDIKVVANGAGAAGIAIIKLLMSMGLKNVIMCDTKGAIYEGRTVGMNPWKEEIAKATNPEKFSGDLAGALVGADAFIGISAANVLNEDMIRSMAKDPIVFCQANPIPEIWPIERAFEAGAKVISTGRSDVINQINNVLAFPGMFRGAIDVRATDINDAMKVAAAYAIAGIVKDEELSADYIIPSTFNPEVAPAVAAAVAKAAIDSGIARRPMDPQEVADGLKKRLANQYK

SEQ ID NO: 11700 - protein, 128 aa, Brassica napus
MTPAIKAPLLPSHDPSSSSPPEEKHGSLAGAIFNVSTSIVGAGIMSIPAAFKVLGVIPSLSIIVIIAWLSNVSAGFLMKSTVAGDATTYAGVMKESFGKPGSVAVQVITMVVTFGSMIIFSIIIGKMF

SEQ ID NO: 11701 - protein, 146 aa, Glycine max
MASEDDAVKKAMIVDARARNISHNVRCTECGSQSIEDSQADIAILLRKLIRDEIQSGKTDKDIYKKLEDEFGETVLYTPKFDMQTAALWLLPLLIAGSAAGVWAYNRHKQKTNVHIMALNLVRGVPLTPKKKKKSNVPTLEGGARY

SEQ ID NO: 11702 - protein, 181 aa, Arabidopsis thaliana
MENDDITVAEMKPKKRAGRRIFKETRHPIYRGVRRRDGDKWVCEVREPIHQRRVWLRTYPTADMAARAHDVAVLALRGRSACLNFSDSAWRLPVPASTDPDTIRRTAAEAAEMFRPPEFSTGITVLPSAGEFDTSDEGVAGMMMRLAEEPLMSPPRSYIDMNTSVYVDEEMCYEDLSLWSY

SEQ ID NO: 11703 - protein, 274 aa, Ceratopteris richardii
MAWSPVKEEHLPQLVSTESTIEKTLKAKDPCKRPKRRAKKRTGKGSTIDDSIDKRRGLTVEQINFLEMSFKEDNKLEPERKACIAKQLGVRPRQVAIWFQNRRVRWKNKQVEQDYETLKARYQDVVKEKDSIMMQYESTMEGNRKLQAEVARLTNLLQSTEGISAHTDMDQVLSNCNSENLNCISENISPAKSADYPSEIIVSGDPTEGDISRFIFQEPISSMPYDLLPDGDYFILSPENSTGSFPSLVQQLVSNGHCVEDAYNIYLGYEYLCC

SEQ ID NO: 11704 - protein, 227 aa, Ceratopteris richardii
RRSPPKEELDDDDLGDELSNPTEKNRRLTAEQVNFLEMSFNIDLKLEPERKALLAKKLGIRPRQVAIWFQNRRARWKNKQIEQDYESLKTKYEAVIKEREVILLQHEAAMQENKRLQAEVRRLMDLVEATGVGACDVTGVSEGKSELMSPSKSTGRSRVTCKTRVKCHSIAVSASGADVPMPRFELDYGFCRSNDMGVDLHECPTFSLWRIFLGLICPCLFVKFASK

SEQ ID NO: 11705 - protein, 336 aa, Euglena gracilis
MAQTIPDQTALPDTTNWQLSDLTLKETLGTGTFGRVRLCLHKSSGNYYAIKCLKKSEVLRMKQVEHILAEASILGSIRHPFIVNMLKTFQDDKRLYIVLEYVVGGELFSHLRKAGKFPNDVAKFYAAEVILAFEYIHSMDILYRDLKPENLLLDVGGHIKITDFGFAKKVPERTFTLCGTPEYLAPEIIQSKGHGKAVDWWALGILTYEMLVGYPPFFDESPFRIYEKILEGKVQFPKWVDGRAKDLIKGLLTTDHTKRLGTLKRGVTDIKKHKWFYGVDWDMLLARKIPAPIPVKVTTPGDSRYFDRYPESKEDKSQPLTPAQQELFKGFGPYST

SEQ ID NO: 11706 - protein, 323 aa, Salmonella enterica subsp. enterica serovar Typhi Ty2
MKPENKIPVLTRLSDEMTAVVNFQQPGLPPWPADGDIETQRQYYLLERRFWNADAPSMTTRTCAVSTPYGDVTTRLYSPQPTSQATLYYLHGGGFILGNLDTHDRIMRLLARYTGCTVIGIDYSLSPQARYPQAIEETVAVCSYFSQHADEYSLNVEEIGFAGDSAGAMLALASALWLRDKHIRCGNVIAILLWYGLYGLQDSVSRRLFGGAWDGLTREDLDMYEKAYLRNDEDRESPWYCLFNNDLTRDVPPCFIASAEFDPLIDDSRLLHQTLQAHQQPCEYKMYPGTLHAFLHYSRMMTIADDALQDGARFFMARMKTPR

SEQ ID NO: 11707 - protein, 395 aa, Zea mays
EFPGEKPLLSHLRFFPWVVNEVYFKVWRQGRTGYPLVDAGMRELWATGWVHDRIRVVVSSFFVKVLQLPWRWGMKYFWDTLLDADLESDALGWQYISGSLPDGRELDRIDNPQFEGYKFDPHGEYVRRWLPELARLPTEWIHHPWDAPESVLQAAGVELGSNYPRPIVELDAANSRLQDALSEMWELEAASRAAMENGMEEGLGDSTDEPPIDFPQELRMEVDRQPVQPAIHAPGVTGRRREDQMVPSMTSSFIRAETELTADFGHTSEDSRPEVPSNIHHLQARPEREETVDGGTGNAVRVHGNHHQQNLQNNMHRVLGIAPSISEASSSWTGRDGGVVPVWSPPAASGHSDSYAADEADISSRGYLDRHPQSHTMMNWSQLSQSLTTGWEVDN

SEQ ID NO: 11708 - protein, 147 aa, Triticum aestivum
  misc_feature (9)..(9): Xaa can be any naturally occurring amino acid
GASKTYPQXQAGAIRKGGHIVIKARPCKVVEVSTSKTGKHGHAKCHFVAIDIFNGKKLEDIVPSSHNCDVPHVDRQDYQLIDITDDGYVSLLTESGNTKDDLKLPTDDVLLGQIKTGFADGKDLILSVMSAMGEEQICAVKEIGGGK

SEQ ID NO: 11709 - protein, 250 aa, Plantago major
AGERFTVYVIVPMWPEGLPESASVQAILDWQRRTMEMMYKDVIQAFQARGIQDDPRKYLTFFCVGNREVKKSGEYEPSQQPEPDSDYGRAQAARRFMIYVHAKMMIVDDEYIIVGSANINQRSMDGARDSEIAMGAYQPYHLAARQPARGDIHGFRMSLWYEHLGMLDDSFVRPESEECVQKVNTIADRYWDLFAAEELERDLPGHLLRYPVAVSSEGTITELPGQEFFPDTKARVLGTKSDFLPPILTT

SEQ ID NO: 11710 - protein, 166 aa, Triticum aestivum
  misc_feature (29)..(29): Xaa can be any naturally occurring amino acid
  misc_feature (50)..(50): Xaa can be any naturally occurring amino acid
  misc_feature (55)..(55): Xaa can be any naturally occurring amino acid
  misc_feature (60)..(60): Xaa can be any naturally occurring amino acid
  misc_feature (71)..(72): Xaa can be any naturally occurring amino acid
  misc_feature (78)..(79): Xaa can be any naturally occurring amino acid
  misc_feature (86)..(86): Xaa can be any naturally occurring amino acid
  misc_feature (105)..(105): Xaa can be any naturally occurring amino acid
  misc_feature (107)..(107): Xaa can be any naturally occurring amino acid
  misc_feature (113)..(113): Xaa can be any naturally occurring amino acid
  misc_feature (117)..(117): Xaa can be any naturally occurring amino acid
  misc_feature (122)..(122): Xaa can be any naturally occurring amino acid
  misc_feature (125)..(126): Xaa can be any naturally occurring amino acid
  misc_feature (131)..(131): Xaa can be any naturally occurring amino acid
  misc_feature (134)..(134): Xaa can be any naturally occurring amino acid
  misc_feature (136)..(136): Xaa can be any naturally occurring amino acid
  misc_feature (149)..(149): Xaa can be any naturally occurring amino acid
  misc_feature (151)..(151): Xaa can be any naturally occurring amino acid
  misc_feature (157)..(157): Xaa can be any naturally occurring amino acid
FPQFQQPHQPFPQPQQQFPQPQQPQQSFXLQPQQPFPQQPQQPFPQQPQXSFPEXPQQPXPQQPQQPFPQXXQQPFPXXQPQQPFXLRPEQPFAQQPQQSQQSFXQXQPQQPXQPCXLQPQXTIXXQPQQXISXAXNEQLSQQPEQTIXQXPQQPLXPSHTNLQPY

SEQ ID NO: 11711 - protein, 435 aa, Thermoplasma volcanium GSS1
MIQLLNNLWVLFSAFLVFLMTIAVGFLEYGELGIALKRSLYKTILITGIAFVVMAVIGFNTAFAPTLYGIIGNPLYKPGFVLGYLNSPTAMFSTIWWATSASYFNTGLLGITYFLFETAFASVTLALVSVVILRKVKMSVFVVFSIVYFIVIYNLPAAWIWNPTGWLYLLGMRDFAGGLVVHGAAGFAGLAIIIRIWQEERKKGIVRSPGEIIKVNDGFLTLAILLLMMGWFGFNPGSVLAFNYDTLIVVMTTFMAALTSMLSTLTVSYLLYKDAGGIMNAVNGILMGLIIVTPLAGFVSPLSAAILGILGGPIFIFANRFFSKRKWFSDPVGLFSGHFTGGIFGVLMIGFFTQHSYAVLSGNSILPNGLFFGGGYLALHTLGIEIMGICAVGLAVFAISYATMYFLSLGFHGILEEPEWKKEERKSLPSSETSK

SEQ ID NO: 11712 - protein, 46 aa, Yersinia enterocolitica
MKGQVKWFNESKGFGFITPADGSKDVFVHFSAIQDQGFKTLAEGQN

SEQ ID NO: 11713 - protein, 282 aa, Candida albicans SC5314
MSYRLIKLNSGHTIPSIGLGCYDIPRNKTVSVVYEACKVGYRHFDTAVLYGNEEEVIEGISKFLRENPNIPRSEFFYTTKLWNNQLGTSSTKQAISTMMAQVGDKLEYIDLLLIHSPLPGKTKRLESWKVLQDAVEKGWIKNIGVSNYGKHHIEELLTNATIPPAVNQIEISPWCMRQDLATWCLSKGINVEAYAPLTHGNKLQVNNTEFQEIMQKYNKSAAQILIKWSLQKGYIPLPKTKTPSRLKENLSVDDFELTNEEIKAIDQPDAYEPTDWECTDAP

SEQ ID NO: 11714 - protein, 194 aa, Ceratopteris richardii
NQGHRKHPSKDVTKDIGDGDELMCGVEKKRRLTAEQVNFLETSFSMDLKLEPERKAHLAKQLGIQPRQVAIWFQNRRARWKNQQIEQDYESLKASYEAVVEEKERLLKEHDLALEANKRLQAEVCFKHAMSLLWSGYEESHVNIYSMTDSITNAYFHCLTRRHSSLILLHFSSQHTLIGFGGICDAWSPTFRYI

SEQ ID NO: 11715 - protein, 216 aa, Magnaporthe grisea 70-15
MAQSGTGAYNNPLKKFKLVFLGEQSVGKTSLITRFMYDSFDGMYQATIGIDFLSKASKPPAHPHRSSESTVRLQLWDTAGQERFRSLIPSYIRDSSVAVVVYDISNAKSFQNTRKWIDDVRAERGNDVIIVLVGNKTDLNDKREVTTQQGEEEAKKNNLMFIETSAKVGHNVQPLFKRIARSLPGMEGTEAAQQAASQMIDVKTNNTQAQQEGCAC

SEQ ID NO: 11716 - protein, 340 aa, Arabidopsis thaliana
MSSTQEASVTDLPVKRPREAEEDNNGGAMETENGGGEIKEPSCMSSIIPGWFSEISPMWPGEAHSLKVEKILFQGKSDYQDVIVFQSATYGKVLVLDGVIQLTERDECAYQEMITHLPLCSISNPKKVLVIGGGDGGVLREVARHSSVEQIDICEIDKMVVDVAKQYFPNVAVGYEDPRVNLIIGDGVAFLKNAAEGTYDAVIVDSSDPIGPAKELFEKPFFESVNRALRPGGVVCTQAESLWLHMDIIEDIVSNCRDIFKGSVNYAWTSVPTYPSGVIGFMLCSSEGPQVDFKKPVSLIDTDESSIKSHCPLKYYNAEIHSAAFCLPSFAKKVIDSKAN

SEQ ID NO: 11717 - protein, 297 aa, Methanopyrus kandleri AV19
MKRETFRYRGDMDLDGFLREMERVGALGAGRLGRAARILEKMWSSDDVTVLLTVAGPAVAGGLGELFERLIREGLVDAVITSGANVVHDALDALGGIHVCLGERNVDGYGRVHDTHIPTEAFEKFEHFMREVLSDLSGRVSCRELLWEMGKRLESGFLRAAADEGVPIYSPGILDSMVGLHVWIHSQDHDFHLDLVDDMHHLADLVFEAEELGAIILGGSVPKHFAMGAAMLRGGLDYAVQITMDRPETGSLSGAPLEEGKSWEKVREDAEVATIVGDYLIIFPLLASGVMQRLGIV

SEQ ID NO: 11718 - protein, 319 aa, Geobacillus stearothermophilus
MKRIGVLTSGGDSPGMNAAIRSVVRKAIYHGVEVYGVYHGYAGLIAGNIKKLEVGDVGDIIHRGGTILYTARCPEFKTEEGQKKGIEQLKKHGIEGLVVIGGDGSYQGAKKLTEHGFPCVGVPGTIDNDIPGTDFTIGFDTALNTVIDAIDKIRDTATSHERTWVIEVMGRHAGDIALYSGLAGGAETILIPEADYDMNDVIARLKRGHERGKKHSIIIVAEGVGSGVDFGRQIQEATGFETRVTVLGHVQRGGSPTAFDRVLASRLGARAVELLLEGKGGRCVGIQNNQLVDHDIAEALANKHTIDQRMYALSKELSI

SEQ ID NO: 11719 - protein, 409 aa, Zea mays
  misc_feature (7)..(7): Xaa can be any naturally occurring amino acid
QVIVVTXGERILGLGDLGCQGMGIPVGKLALYTALGGVRPSACLPITIDVGTNNEDLLKDEFYIGLKQRRATGQEYSEFLDEFMAAVRQNYGQKVLVQFEDFANHNAFTLLEKYRTNHLVFNDDIQGTAAVVLAGIIAALKSVGGTLADHTFLFFGAGEAGTGIAELVALEISRQANVSVEEARKKIWLVDSKGLIVASREETLQPFKKRYAHEHEPVKDLLGAVKAIRPTALIGSAGVGQSFTKEVIEVMSSINERPIVLALSNPTSQSECTAEQAYTWSQGRAIFGSGSPFDPVKYNDKLFVPAQANNAYIFPGFGLGVVISGAVRVSDDMVLAAAEALAEQVTPEHIEKGLIYPPFSIIRKISANIAAHVAAKAYDLGMATQLPRPKDLVKYAESCMYSPVYRSYR

SEQ ID NO: 11720 - protein, 136 aa, Methanopyrus kandleri AV19
MDVAVKKVEVRQLKKGKYIMIDDEPCKIVEYTTSSPGKHGSAKARIVAVGLFDGKKRTLTKPVDAKVDVPVIERKTAQVVSDMGDTVQLMDMETYETFEVQKPEDEELASQLEPGTMVEYMEAAGKRKIVGIKEEE

SEQ ID NO: 11721 - protein, 122 aa, Candidatus Carsonella ruddii
MIQEQTYLKVADNSGGKVVKCIKVLNGTNKKYANIGEIIKVVVKTANFKSKIKKSQVLKAMIIRSKTGIKRLDGTIIKFNDNSVILLNNNEQIISTRVFGIILRELKNEKFAKLISLSNEII

SEQ ID NO: 11722 - protein, 254 aa, Brassica rapa subsp. rapa
MGRGRVEMKRIENKINRQVTFSKRRAGLLKKAHEISILCDAEVSLIVFSHKGKLFEYSSESCMEKVLERYERYSYAEKQLKAPDSHVNAQTNWSMEYSRLKAKIELLERNQRHYLGEDLESISIKELQNLEQQLDTSLKHIRSRKNQLMHESLNHLQRKEKEILEENSMLTKQIKERESILRTHQNQSEQQNRSHHVAPQPQPQLNPYMISHQASPFLNMGGMYQGEDPTAVRRNRLDLTLEPIYNCNLGYFAA

SEQ ID NO: 11723 - protein, 491 aa, Sinorhizobium meliloti 1021
MALTPALTRHIRRPKIFASLDEVTRSSGQPAGPVFDVSNPSTGELLATLPDMGIDDARTAIDAAALAQPLWAGKPAKDRSIILRRWHDLIVEHADDLAAILTAEMGKPVGEAKGEVLHAASYVEWYAEEAKRVYGETFPAPANDRRMLVIKQPVGVVGTITPWNFPASMVARKISPALAAGCTIVLKPAEQTPLVAGAMFVLAEKAGFPEGVLNLLYASEGAPIGRELCGNPKVRKISFTGSTEVGRLLMRQCSDQIKKVSLELGGNAPFIVFDDADIDEAVDGAVQAKFRNAGQTCVSANRIYVQSAVHDAFAEKFVTRVRELTVGDGFAPDVAIGPMIDAHAIDKIEAHVADAVAKGAQVRSGGSRIGTTGTFFEPTVLTGISHDMRIAQEETFGPIAPIIRFETAEQVVAEANDTIYGLAAYFYAENLKRVWHVAEALEYGMVGINTGRMSSEAAPFGGIKQSGIGREGSRHGLEDYLEMKYLCMGNI

SEQ ID NO: 11724 - protein, 501 aa, Oryza sativa (japonica cultivar-group)
MDGRSILMGRYEVGKQLGQGTFAKVYYARNLTTGQAVAIKMINKDKVMKVGLMEQIKREISIMRLVKHPNVLQLFEVMASKSKIYFVLEYAKGGELFNKIAKEGKLSEDSARRYFHQLINAVDYCHSRGVYHRDLKPENLLLDENENLKVSDFGLSALAESKRQDGLLHTTCGTPAYVAPEVLSRKGYDGAKADVWSCGVILFVLVAGYLPFHDPNLIEMYRKICRADFRCPRYFSAELKDLIHKILDSDPSTRISIPRIKRSTWYRKPVEINAKNSEAATTNSISSGVATTSGSAECSTSEENQGSLSLPNLNAFDIISLSTGFNLSGFFEDTHGHQEERFTTRQPVTTVLGKLKELAKRLKLKVKKKDNGVLRLAAPKEGKKGFLELDAEIFEVTPSFLLVELKKTNGDTMEYRKLVKEDIRPALKDIVWVWQGDEHLNSQSILQGEQQQSPLPPELPQDQLQPSLPQQEKQDMPEPPLLPQVPQEEVQTSIPAEQTKN

SEQ ID NO: 11725 - protein, 284 aa, Schizosaccharomyces pombe
MLIAAMGPKIPVPAYGVGTALFKKEKGEINRTIVDSVKNALAAGFIHIDCAEVYGNEEEVGVALKEANVPRSKLFITSKVMHNVDNIPEALNESLRKLGTDYLDLYLLHSPIPFYEKKIPISEGWKAMETALGTGLVHSVGVSNFRIPDLEELLKTSTITPRVNQIEFHPQVYKAAKPLVEFCQSKGIIVEGYGPLSPLVRDAQGPVAEFTKSLESKYHVSDTQILLKWAYSKGVIPITTTSKIERMKECLNFDSFTLDKADIDELGTLGVQHHKRTFMKHMDE

SEQ ID NO: 11726 - protein, 280 aa, Listeria innocua Clip11262
MTLSFSDTYRLNNGIEMPRHGFGVYKLTDEQRMRTALETAVDVGYRLFDTASFYHNEKELGDFFASSGLKRDEFFVTTKMWNTEQGYDETLRAFEKSQKKLQLDQVDLYLVHWPKQDTFFETWRAVEKLYDEGLVRAIGVSNFEAHHLDRLRTSANVLPVVDQLETHPHFPNQLLHRYLEELHIVHQAWSPLGRGGVLQEQILIDLAKKHGKSPAQIVLRWHLQNNISIIPKSETPSRIRENADIYDFELTEADMRQVERLNNGERVSHAPDVMYVRSEI

SEQ ID NO: 11727 - protein, 296 aa, Euglena gracilis
RSYMEKYAKDEVAYFRDFATAYQRLAELGVPELPVPWDEIRADVAALVAEKGCAPILIRLAWHDAGTYDQQSNTGGPRAVMRFPGGEAEHGSNNGLDIARGLLQPIVDKYSWVSTADLWAFASVVATEVSGGPKIPFRPGRRDAVTAKEAVERGRLPDATQTTNHLRDVFYRMGMTDEEIVALSGAHTMGRCHAERSGFEGPWTDNPLVFDNSYFKLLLERKWTAVTNSVGNLQFQDETGTLMMLTSDLALLMDPSFRKHVERFAADQDAFFRVYAGAYQKLTEGGCPFSKGAVPL

SEQ ID NO: 11728 - protein, 380 aa, Lactococcus lactis subsp. lactis bv. diacetylactis
MVDFNKVLDLHELHTGVLDIQADIDVKKPSDLAEAYTPGVAELSKLIQSDPEAKRKYTMSGKLVAVVTDGTAVLGLGNMGPAGGLPIVEGKALLYKELAGVDAIPIAVEQIGAEKIIETIKNISQSFAGIHLEDISAPQCFEIEERLSKNLNIPVYHDDQAGTAIVVLAGLMNAAKLVNKKLEDLKIVINGVGAAGVATGRLFAEVGIKNVTLIDIEGKVNDKVKSYNRYQLELAKRFNRVAGTTLDEVIDGQDVFIGLSDAKVLTGTQVERMAKDAIIFALANPVPEILPEEALKHGAAVVATGSNQWPNQVNNVLVFPGLFKGLLSANVQHVDYKLQANIATAIADVIKNPDRNHIVPGVFDAGVVESVTKAVKDSAK

SEQ ID NO: 11729 - protein, 301 aa, Zea mays
  misc_feature (6)..(6): Xaa can be any naturally occurring amino acid
RLFYKXLLIDNVEELLPVVYTPTVGEACHKYGSIYRRPQGLYISLKDKGKILEVLKNWPERSIQVIVVTDGERILGLGDLGCQGMGIPVGKLSLYTALGGVRPSAVEGATPDRLAFWECWPKRPKARCYACGRVCRGPTTWMGAPFVRAAPTDTSCVGGPCLPITIDVGTNNEALLNDDFYIGLRQRRATGEEYHELVEEFMAAVKQNYGEKVLTQFEDFANHNAFDLLEKYRESHLVFNDDIQGTASVVLAGLLAALKAGTGIAELIALEMSKHTGSPIEECRPKIWLMDSRGLIVASRK

SEQ ID NO: 11730 - protein, 314 aa, Glycine max
MMASPTSPRVLFLSLFVTLSMILHLSSARKLSESDPQLQFQYHRGPLLTGKISVNLIWYGKFKPSQKAIVADFITSLSSSKPLTAQPSVATWWKATDKYYKNSFPKLALSLGSQIVDENYSLGKSLTTNQILKLASKGPQRNAINIVLTSAEVAVEGFCSSRCGTHGSSVGARVNGKRYKFAYMWVGNSETQCPGQCAWPFHQPIYGPQNPAPLVAPNNDVGLDGMVINVASLLAGTVTNPFGNGYFQGPKEAPLEAGSACTGVYGKGAYPGYAGNLLVDPTTGASYNANGVNGRKYLLPALVDPKTSSCSTLV

SEQ ID NO: 11731 - protein, 475 aa, Oryza sativa (japonica cultivar-group)
MGNCFGSEEAEAAATVRAPAQGHHGRRQDSDQISNLAAEAAAPANRRSPIMAPPKALASMSSAAGHHSGMRSSSSMSSITTRSSSSSSNLPLGAAGGADVGVAGALYPEPEGRILEVPNLRIFTFAELRAATRNFKPDSVLGEGGFGRVYKGWVDERTMSPARSGTGMVIAVKKLNPESVQGLQEWQSEINFLGRLSHPNLVRLIGYCVEDRELLLVYEFMAKGSLENHLFRKGSAYQPISWNLCLRIAIGAARGLAFLHSSERQIIYRDFKASNILLDTHYNAKLSDFGLAKNGPTAGESHVTTRVMGTYGYAAPEYVATGHLYVKSDVYGFGVVLLEMLTGMRALDTGRPAPQHSLVEWAKPYLADRRKLARLVDPRLEGQYPSRAAQQAAQLTLRCLSGDPRSRPSMAEVVQALVEIERIRSRPKAASSREDASPRVPTRSGGHGHHHHHHSSRPRSGSDGARSGYPSPRVR

SEQ ID NO: 11732 - protein, 1090 aa, Ustilago maydis 521
MSSSTSAAIPPQANSDESNPLRTPPPPSSSTSSSSSSLSASTVSTPTPLAAGATSSSAVQSASASSPDPAVAFIPTPSSSSAPVTAQVSPPKITPATPSSSFSPPPPSSSSPSATVSVSSSPPTSSTIHHATVSDPTTEDIDMAVSTVSHPAPDLVLTDLGASSKRITPLASATIPHNSPQLEGTPLNPSQQQLALDALVPASALSTSSQPFSPISNSPQPMQPTKSSPATPTSLVKHSELTPSPRDRSAASGSASSSTPASSTTPALPPKVAPVMAGMGTLPPNVPPPSASASASTSAFSASDTLRAIPTNKNNPAFLNKLRSMVDDPNTDELIRWSPDGASFFVPNHVRFGDQVLPRFFKHNRFSSFVRQLNMYGFHKVPHLQQGALKHDSPQESELWEFSNPHFHRDHPDWLSKVQRKKGPRDDKDNHADREASATTGQELMHAGALMRTDFGMNNLGADANADGALQLASVLNAINAIKNAQTSISADLRHLQNSNQNLWQEAVESRQRAKRQQETINKILRFLAGVFGNQEDTETPVPGKKVSGKARAGKRVGVRPQQQQQQQQQHQQHQQQRSKSRLMIEDGNASSSSSHRGIQGLDLPLDQEEIEEMPYHLRFQEASNSDSPKVQSPSANLGASRFTQIGSPPSSSSAADFGRQLSEAVSTPGGSRRLSSQASNQVLNALASGEGNAWLASLFGASLANQGSKSTGPASGGGLKLDPHMVAALQQALASAGGVNSASDNTGDYFGSTTGAPADDGSSRFSAFPSSSSNASAVSSSNSAQANALGLDADALARFGASISHALVQSPARPNPNAGASNTQPTNYSVTSPSKGGSANLFDMGNDEVTSSGNNNQQLALSLSRATRDLQNTSSDVDQVQSSINSLIQGLQGIAGQAPASASASASDRAAVVPWQTTSGAAFDAAPATFGDASGSASVGNQFEAPSGTTPPSSTVDVGATSGTNAGMDDFDVDSFLSQFVDSSQAPGGGVTSPTPNNAYGESPSFAFSPATTAAFLHGAATSASDLPYAQQLTSKAESGTSSNSSSSRLNGKADSNAPKKRKPSTSGVELAVDVDMPDRPLKKSGRKA

SEQ ID NO: 11733 - protein, 339 aa, Oryza sativa (japonica cultivar-group)
MDAAAAAVSTLSALAVFASTLDHGAVRSVHGYKVYGRGGRRRWERWVEREFVLTPASCREVPAPVAPPRILPAEWRGRPAYREGQVVAAGAWRCILAFDSAAAPPRTPPPVLSPFLNPRLMCVPSLYNDLEKVFRFQNVEKIPKLMQCDSEEKLSSWDARDKSSDEVHASESDSDDDLQSGEEEKPTVQKQRRANKKHIASITLVDIAQYFHLPIREASRTLKIGVSILKRKCRQYNIPRWPHRKIKSLDSLIQDLEYVIDDGDDHDDTGDDVQQEKHKQTAEEKQEAIMALTRRKQMLETEKETIQQIPAMDLKVETKQFREDVFKRRYRAKKDLAND

SEQ ID NO: 11734 - protein, 167 aa, Saccharomyces cerevisiae
MQEFYSFSPIDENGNPFPFNSLRNKVVLIVNVASHCAFTPQYKELEYLYEKYKSHGLVIVAFPCGQFGNQEFEKDKEINKFCQDKYGVTFPILHKIRCNGQKQDPVYKFLKNSVSGKSGIKMIKWNFEKFVVDRNGKVVKRFSCMTRPLELCPIIEELLNQPPEEQI

SEQ ID NO: 11735 - protein, 428 aa, Pseudomonas aeruginosa
MADKKAQLIIEGSAPVELPVLSGTMGPDVVDVRGLTATGHFTFDPGFMSTASCESKITYIDGDKGVLLHRGYPIEQLAEKSDYLETCYLLLNGELPTAAQKEQFVGTIKNHTMVHEQLKTFFNGFRRDAHPMAVMCGVIGALSAFYHDSLDITNPKHREVSAHRLIAKMPTIAAMVYKYSKGEPMMYPRNDLNYAENFLHMMFNTPCETKPISPVLAKAMDRIFILHADHEQNASTSTVRLAGSSGANPFACIASGIAALWGPAHGGANEAVLRMLDEIGDVSNIDKFVEKAKDKNDPFKLMGFGHRVYKNFDPRAKVMKQTCDEVLQELGINDPQLELAMKLEEIARHDPYFVERNLYPNVDFYSGIILKAIGIPTSMFTVIFALARTVGWISHWQEMLSGPYKIGRPRQLYTGHTQRDFTALKDRG

SEQ ID NO: 11736 - protein, 379 aa, Psychrobacter sp. 273-4
MAAQNQSTKVLSGAGLRGQVAGKTALSTVGKSGSGLTYRGYDVSELADKCIFEEVAYLLLYGNLPTQSELDAYQTKLKGLRGLPQSLKEVLERIPAAAHPMDVLRTGCSMLGNLETEISFDEENDQADRMLAAFPSIINYWYRFSHDNVRIETETDDETIGGHFLHLLKGEKPNELHTKVMNVSLILYAEHEFNASTFTARVCASTLSDIHSCITGAIGSLRGHLHGGANEAAMDMIEGFSSPDEAESEMMAMLARKDKIMGFGHAIYSESDPRNVVIKGWAEKLAADVGDDVLYPVSVRCEEVMWREKKLFCNADFFHASAYHFMGIPTKLFTPIFVCSRLTGWAAHVFEQRANNRIIRPSAEYTGEELRPVPDMSAR

SEQ ID NO: 11737 - protein, 589 aa, Zea mays
  misc_feature (559)..(559): Xaa can be any naturally occurring amino acid
  misc_feature (572)..(572): Xaa can be any naturally occurring amino acid
MCGILAVLGCSDWSQAKRARILACSRRLKHRGPDWSGLYQHEGNFLAQQRLAVVSPLSGDQPLFNEDRTVVVVANGEIYNHKNVRKQFTGTHNFSTGSDCEVIIPLYEKYGENFVDMLDGVFAFVLYDTRDRTYVAARDAIGVNPLYIGWGSDGSVWIASEMKALNEDCVRFEIFPPGHLYSSAGGGFRRWYTPHWFQEQVPRTPYQPLVLREAFEKAVIKRLMTDVPFGVLLSGGLDSSLVASVTKRHLVETEAAEKFGTELHSFVVGLEGSPDLKAAREVADYLGTIHHEFHFTVQDGIDAIEEVIYHDETYDVTTIRASTPMFLMARKIKSLGVKMVLSGEGSDELLGGYLYFHFAPNKEELHRETCRKVKALHQYDCLRANKATSAWGLEVRVPFLDKEFINVAMGMDPEWKMYDKNLGRIEKWVMRKAFDDDEHPYHPQHILYRQKEQFSDGVGYNWIDGLKSFTEQQVTDEMMNNAAQMFPYNTPVNKEAYYYRMIFERLFPQDSARETVPWGPSIACSTPAAIEWVEQWKASNDPSGRFISSHDSTAIDHTXAVSRRWPTAAATXAANGTVNGKDVAVAIAV

SEQ ID NO: 11738 - protein, 453 aa, Geobacter sulfurreducens PCA
MPDYDTQTLRDWDRRHIWHPFTQMKEWEESEPVVIVEGEGSWIIDSEGKRYLDGVAAIWTNVHGHCRREINEALKAQVDRLEHSTLLGLTNDRAVVLAKRLAEIAPPGLCKVFYSDNGSTAVEVGVKMAFQFWRHEGKPEKSRFISFTSAYHGDTLGAVSVGGIDLFHGVFRPLLFPTIQAPAPYCYRCPMGRDTPAACGMECLTELERIMESHAGEVAGLVIEPLVQGAGGMIVQPEGFLKGVRELCDRHDILMIADEVAVGFGRTGAMFACGREGITPDIMALSKGITAGYMPLAATLATQQVYDAFLGEYREMKTFFHGHTFTGNPLGCAVALASLDLFESDRLLGKLPNKIKLLQEKLKGLIELEHVGDVRQCGMIAAVELVRDRATKEPFDWEERVGVRVCLEARTHGVFLRPLGNVIVIFPPLAITAEEIDFLVDGLEKSIHTVTGG

SEQ ID NO: 11739 - protein, 394 aa, Zea mays
MALSIYTPTSSSLVPPSIQEVRLTSRPPKPATFSLRRPHLAARAAAGNAPTSPVREVVTELDAVAGFSEIVPDTVVFDDFERFAPTAATVSSSLLLGITGLPDTKFKSAIDTALADGECNALEKAEDRMSCYLTKALANVGAELAHQVPGRVSTEIDARLAYDTQGIIHRVHELLNLYNQHDVSTDRLLFKIPATWQGIEASRLLESEGIQTHLTFVYSFAQAAAAAQAGASVVQMFVGRLRDWARHHSGDPEIDEALKNGEDAGLSLAKKVYAYIHRNGYKTKLMAAAIRNKQDVFSLLGIDYIIAPLKILQSLEESVTDPDVKYGYVPKLTPAIGKTYNFTEEELVKWDQLSLSAAMGPAAEELLASGLEGYVNQARRVEELFGKIWPPPNV

SEQ ID NO: 11740 - protein, 482 aa, Streptomyces avermitilis MA-4680
MSILNDVPKQLFIGGTWADAADGATMPVDDPATGEILCHVADAGPKDARLAADAAVEAQDGWARTAPRERSEILRRAYEIIVSRTGELALLMTSEMGKPLAEARGEVAYAAEFFRWFSEEAVRIDGGYGVLPDGRNRMLLMRRPVGPCLLVTPWNFPLAMGTRKIGPAIAAGCTMVLKPAPQTPLSSLALAGILKEAGLPDGVLNVVTTSRAGEVVEPLLTGGRIRKLSFTGSTRVGRLLLAQCADAVVRTSMELGGNAPFIVLDDADLSAAVDGAMTAKMRNMGEACTAANRFFVHRSVADEFGRRLAERMGALVVGPGTRDGVDVGPLIDEAGRAKVEELVADAVERGARVLVGGVAPDGPGRFYPPTVLADVDPGSRLMETEIFGPVAAILVFDDEDEVVRRANDTPWGLVGYVFTQGLDRALRVSERLEVGMVGVNTGLVSNPAAPFGGVKQSGLGREGGRVGIEEFLEYKYLAVPLR

SEQ ID NO: 11741 - protein, 441 aa, Glycine max
  misc_feature (130)..(130): Xaa can be any naturally occurring amino acid
MSGMKVAKGRILVGKYELGKTIGEGSFAKVKFARNVQNGNYVAIKILDRKHVLRLNMMEQLKKEISTMKLINHPNVVRIHEVLASKTKIYIVLELVDGGELFNKIAKNGKLKEDEARRYFHQLINAVDYXCHSRGVYHRDLQPENLLLDSNAILKVTDFGLSTYAQQEDELLRTACGTPNYVAPEVLNDRGYVGSTSDIWSCGVILFVLMAGYLPFDEPNHATLYQKIGRAQFTCPSWFSPEAKKLLKRILDPNPLTRIKIPELLEDEWFKKGYKPTTFVEEEDVNVDDVAAAFNDSKENLVTERKEKPVSMNAFELISRSQSFNLENLFEKQTQGLVKRETHFTSQRPANEIMSKIEEAAKPLGFNVHKRNYKMKLQGDKSGRKGHLSVATEVFEVAPSLHMVELRKTGGDTLEFHKFYKNFSSSSGLQDIVWHDTEGKK

SEQ ID NO: 11742 - protein, 44 aa, Triticum aestivum
MSDTDEHHFLSKADSGAFKTYPHQAVAIRKGGHIVINARPCKVV

SEQ ID NO: 11743 - protein, 302 aa, Triticum aestivum
  misc_feature (29)..(29): Xaa can be any naturally occurring amino acid
  misc_feature (71)..(71): Xaa can be any naturally occurring amino acid
  misc_feature (200)..(200): Xaa can be any naturally occurring amino acid
MDSLSPVRGSPCFPAGFPGNLFPFALFLXSPVPTFKRILKAKSTEQFDGLPYLLSLLNCFICLWYGLPWVXDGRLLVATVNGTGAAFQLAYISLFFIYADSRKTRLRMVGLLALLVCAFALVAHASIAFFDQPTRQQFVGAVSMASLISMFASPLAVMGVVIRTECVEFMPFYLSLSTLLMSASFAVYGVLLRDLFIYLXTGLELSWEQRSWHSTLTTAGNGDARIHLRRCLPDQTSSDQFSVLAWLERAGVGFCRRELYAPALFSLVDAESACTDLLAYASVYMLLKCHSFKKKKKAAALR

SEQ ID NO: 11744 - protein, 472 aa, Triticum aestivum
MVPREHGDEAIVADGHGKEEEVGVMGVSSGGADGDEEQHGGGGGKFSVTSFLWHGGSVWDAWFSCASNQVAQVLLTLPYSFSQLGMLSGILLQLFYGFLGSWTAYLISVLYVEYRSRKEKEGVSFKNHVIQWFEVLDGLLGPYWKAAGLAFNCTFLLPRARVQLRARASNIYYINDRLDKRTWTYIFGACCATTVFIPSFHNYRIWSFLGLGMTTYTAWYLTIAAAVHGQVPGAKHSGPNSLMLYFTGATNILYTFGGHAVTVEIMHAMWKPRKFKYIYLVATLYVFTLTLPSASTMYWAFGDALLTHSNAFSLLPKSGWRDAAVILMLIHQFITFGFACTPLYFVWEKAIGMHHTGRVLRRALARLPLVLPIWFLAIVFPFFGPINSAVGALLVSFTVYVIPALAHMITYRSAHARENAVEQPPRFVGRWTGTYVINAFVVVWVLVVGFGFGGWASITNFLRHHRHHSHRL

SEQ ID NO: 11745 - protein, 219 aa, Candida albicans SC5314
MSSDKSNLLKKYKIVFLGDQSVGKTSLITRFMYDTFDETYAATIGIDFLSKTMYLEEGKTIRLQLWDTAGQERFRSLIPSYIRDSHVAVICYDITNKKSFDNLDKWIKDVKLERGDDVIIVLVGNKSDLASDKRQVSLDDVENLQIKIGAKFFIETSTKANHNVKLLFKKIAQSLPDFNQDSNDKSNDNNNNNNNNQSETIDITIDNTAPNPQGTSTCC

SEQ ID NO: 11746 - protein, 499 aa, Methanococcoides burtonii DSM 6242
MVDKCSNYMGRIAGFFNLSPSSISQIRIFNEMEVRGEYEAIIYTGDTIHNVHSASEIQFISLNDAMIGFDSLKASSPLSSSSDKFELVGDIDIYNSDEFACEFHCGNVENMSILTRFLQDTFGLEKCSDDEMFQRFDSSLKAIRGVYAIACHIGDKVFLARDLIGVKSLWYDVSSGFAFASEKKFLEMAGLHEVVELDPRHILCYDFENDIIKSYDREFLQGLAEHQGSFVEIRNGFLSLLKEAVSKRVPDEDFGVMFSAGIDSTILALLCKGFAEAKGVKCNYYTVGLSGQVPSPDIACARKLADELELELNVHEIGLDTVEEYLSTVVPLIEDATVPKTGVALTMYAACRAAKEDGINVLFAGAGADELFAGYNRFKSSESVNEDCIRDIMEMHKVNTYRDDTVAAFTGTIVRYPYLDENFVEYALAIPKEYKISDEMNKIVLRKAGEELGLPKYVVERGKKAAQYGSSFDQALKKLAKRAGFANKTDYINSFQERR

SEQ ID NO: 11747 - protein, 534 aa, Glycine max
NSARVQSLVSHLRLIVLLLSVSLGNSASLQENFVQCLNLNSDRTFPFYSSIYTPKSPSFTSILDSSAQNLRLLVPSTPKPEFIFTPSRDSHVQAAVICSKKLGIHIRVRSGGHDYEGISYVSEIESPFIVVDLVKLRGIDVDVKSNTAWVQAGATTGEFYYRIYEKSSVHGFPAGLCTSLGIGGHITGGAYGAMMRKYGLGVDNVLDAKIVDANGRILDREAMGEDLFWAIRGGGGGSFGILLWWKIKLVSVPPTVTVFTVTKTLEQGATKILHKWQEVAPYIDENLFIRVIIQPSSDARNKTQRTIATSYNALFLGGARTLLQVMKTSFPELGLTIKDCLETSWIKSVLYIAGFPSDTPPEVLLKGKSTFKNFFKAKSDFVREPIPETGLEGLWQRLLVEDSPLMIWNPYGGRMSQFSESETPFPHRNGTLYKIQYLSLWQEGDKNAAKHIDWIRKLYNYMGPYVSSLPREAYVNYRDLDLGINTKNSTSYIQASAWGYRYYKNNFDRLVKIKTKVDPENVFRHEQSIPPLPL

SEQ ID NO: 11748 - protein, 320 aa, Candidatus Blochmannia floridanus
MIKKIGVLTSGGDSPGMNAAIRGVVRAGLSEGIEVYGIYDGYLGLFQNRMMLLSYCSVSDIINKGGTVLGSSRFPELKKDMIRSVVMNNISKSHLDALVIIGGDGSYIGARRLSDLGCPCIGIPGTIDNDVAGTDYTIGYFTALETIIEAIDRLRDTSSSHQRISIVEVMGRYCGDLTISAAIAGGCEFVIIPELKFQMQDLVDKIKLNISKGKKHAIVAITERICNVFDLAQYIENETGKETRATVLGHIQRGGKPVAYDRILASRMGAYSIELLLKGYGRHCIGIENEKLVHHDINDATKYMRRSFRQDLLTTAKKLC

SEQ ID NO: 11749 - protein, 250 aa, Brassica napus
MTKSYPTVSEDYQNAIEKCKRKLRGLIAEKNCAPIMVRLAWHSAGTFDCASRTGGPFGTMRFDAEQGHGANSGIHIALRLLEPIREQFPTISFADFHQLAGVVAVEVTGGPEIPFHPGREDKPQPPPEGRLPDATKGCDHLRQVFTKQMGLSDKDIVALSGAHTLGRCHKDRAGFEGAWTSNPLIFDNSYFKELLSGEKEGLLQLVSDKALLDDPVFRPLVEKYADDEEAFFADYAEAHLKLSELGFADA

SEQ ID NO: 11750 - protein, 439 aa, Ustilago maydis 521
MESQLANLHLDGGSTADLKQGSRPSHAQASHGNRHVHPTNSSLRPLAPSSSIASNMGINMGVNMQHFNRLAASSTGLTNPNSIAQGMSRAAQQPLNGSRPSTQQQPTQAHIKSRPPSVAGGLNAAAGPSYRPAAPAAQSTKQPASAGSAVASVDLGRYDGGLERDEARGRRGTMQFDPLTLSSADAGKQHPPTRVWSLKDFEMGRPLGKGKFGRVYMVRTRAAPNKGYIIALKCMYKNELVENKVEKQLRREIEIQMNLRHPHILRLHGYFHDEGRVFLMIEFAGRGELYKLMNKLHDRRFEEKVAATYIAQMADALSYLHSKHVIHRDIKPENLLLGIKGDLKIGDFGWSVHAPGNRRQTLCGTLDYLPPEMVNGEQHDKAVDLWALGVLCYEFLEGVPPFEELENAPAGTYKRINNIDFKIPRHFSPEAADLTTGYP

SEQ ID NO: 11751 - protein, 143 aa, Zea mays
MAMAYKMATEGMDVKEECQRWFMEMKWKKVHRFVVYRIDERSRAVLVDRVGGPGEGYEELVAALPGDDCRYAVFDFDFVSVDNCQKSKIFFIAWSPAASRIRAKILYATSKQGLRRLLDGVHYEVQATDPSEMGFDVIRGRAQ

SEQ ID NO: 11752 - protein, 488 aa, Glycine max
  misc_feature (342)..(342): Xaa can be any naturally occurring amino acid
MESRFKSNPQLRRGLCCANDDKQQERSPSVIVIGGGMAGIAAARALQDASFQVILLESRERPGGRIHTDYSFGFPVDLGASWLHGVCPENPLAPLIGKLGLPLYRTSEDNSVLYDHDLESYALFDMDGNQVPQELVTKIGKIFGAILEETNNVREEFSEDMSILRALSIVFERKPELRLEGLSHKVLQWYLCRMEGWFATDADTISLKCWDQEVLLPGGHGLMVRGYQPVINTLAKGLDIRLGHRVTKIVRQYNEVKVTVENGKTFVADAAIVAVPLGVLKAKSIKFEPKLPDWKEAAISDIGVGIENKIILHFKNVFWPNVEFLGVVAETSYGCSYFLNLXHKAMGRPVLVYMPAGQLAKDIEKMSDEAAANFAFMQLKKILPDASSPIQYLVSRWGTDINTLGSYSYDAVGKPHDLYEKLRVPVDNLFFAGEATSMLYTGSVHGAYSTGMMAAEDCRMRVLERYGELDLFPPVGDVSVIPLQISRL

SEQ ID NO: 11753 - protein, 358 aa, Triticum aestivum
  misc_feature (235)..(235): Xaa can be any naturally occurring amino acid
  misc_feature (325)..(325): Xaa can be any naturally occurring amino acid
MAGEGGSGGERGKDPLEGVRAIVLKPSESLDESRFTKIAGADFNDAGLGLDGLLGSLASTGFQASNLGDAIDVVNQMLDWRLSHEKPTEDCDEAELDPKYRESVKCKIFLGFTSVDVIVTTAGGIEEDLIKCLAPTYRGEFSLPGALLRSKGLNRIGNLLVPNDNYCKFENWIMPLFDQMLQEQSTENVWTPSKVIARLGKEINDESSYLYWAYKNNIPVYCPALTDGSLGDMLXCHAVRNPGLIIDIVQDIRLINGEAIHASPRKTGAIILGGGLPKHHICNANMFRNGADYAVYINTAQEFDGSDSGAQPDEAVSWGKIKGSXAKPVKVHCDATIAPTLLVAATFARRSHGANSTN

SEQ ID NO: 11754 - protein, 386 aa, Magnetospirillum magnetotacticum MS-1
MIDTTVHSASPGFEHKEDLESGTRAAAQAGVVAIFEMPNTKPSTTTADAILDKLARAKGRAWVDHAFFIGAASDNVDHLAQWERIPGCAGIKVFMGSSTGNLLVADDETLGRVLAQGFRRVAVHCEDEGRLIERKHVAEEGAHPRVHHLWRDEETALMASKRLIALAETARRRVHVLHVTTAEEMEFLAGHKDVATVETTPQHLTLAAPECYERLGTYAQMNPPIRGTRHRDALWKAIADGTVDVLGSDHAPHTREEKDKPYPQSPSGMTGVQTLVPLMLDHVNQGRLSLERLVDLTSAGPARIYNIAGKGRIAVGYDADFTIVDMKAERIITNDWIESRCGWTPFDGRKVTGWPVATIVRGSTVMRDGQLLGQASGEPVRFQECP

SEQ ID NO: 11755 - protein, 217 aa, Cryptomeria japonica
MVRGKVNLQRIQNPVNRRVTFSKRKAGLLKKAGELSVLCEAEICSIIFSPTGKLFEFASHSMNRIIGKYKKNCASIGHHIQLQEHLETLRMELENLRIETTHLEKTCKHMNGEDLDFLNFKELQKLEKKMSLSARKIHLRKDKILVENVGSLKSKEKLLELENAEMDKKIGRSHKACHLNINMMDEVNSKLETEASTRQDCLKLTLISRNFHDDNFC

SEQ ID NO: 11756 - protein, 504 aa, Sphingomonas sp. LB126
MMESTGNAAIFEQARARIARPFGHFINGLWEAGSGEPIAVVNPATEQPIGSIAAGGEAEVDRAVAAARQRFESAEWTRMPAAERERLLLRLADLVERDRDELAAIETLDNGMPFAPARMMAVGSAISAIRYNAGWARRMTGEEAPVSVPGRWHGYTSREPLGVAALIVPWNAPFAITCNKVSAALAAGCTVVLKPAELAPMSGLRLAELVQEAGFPDGCLNVVTGLGAQAGAALVRHPGVDKISFTGSTATGQSILRETAGRLTRVSLELGGKSAVLVFPDADLEKAIPAVAMGIFGNSGQVCAAGSRLFLHDSVFDRFVTGLVDFAEKLMVGPGDQPGVALGPLISAGQKERVMGYIAAGEAEGAQIATRGSAPDEPGYFVKPTIFVDTRPDMRIVREEIFGPVLSVMRFSDDNLENLARQANDSIYGLSAYVWTRDLSTAHAMARYLRAGSVKVNGSGMEFALPFGGFKQSGIGRENGPRGGGSLYRKEVGNDRLVMVWTAL

SEQ ID NO: 11757 - protein, 96 aa, Glycine max
  misc_feature (31)..(31): Xaa can be any naturally occurring amino acid
PEYGVHLGLAANNNSPSRSNPQAHAENLICXGANTHSNAQNTAGVITMAREGVRDFDTPTKELSPILACKPGLNIRGETNLASGIQAAQQAIKSLR

SEQ ID NO: 11758 - protein, 372 aa, Zea mays
  misc_feature (26)..(26): Xaa can be any naturally occurring amino acid
  misc_feature (34)..(34): Xaa can be any naturally occurring amino acid
  misc_feature (231)..(231): Xaa can be any naturally occurring amino acid
RVSQGKPDEIEESISMVEILAVQLAXREAELLLXKEEFTKFAKSLKQASEDAKRIVEEERANAHTEIETAKGAVQRVQQAVQEHEKMSQNTGKQDMEELKKEVREARRIKMLHQPSKAMDLENEIRILRNTFAEKSKDCVSLLKELEMHKRLKENGTIPSFDLEGLQCLGSMLRIVGLSGTHMDLSNISIQWFRIHPKESNKEIISGATRPVYALEPHDVRRYLQAEIDCXGEIAVAKTAGPVDPVAGLVDYVETLVRKPETEFNVVVLQLNGIDLPKESVHVLNVGRLRMRLTKGKSVVPKEFYSSSMQLCGVRGGGEAASQAMFWRPRNDLSLVLAFESTRERNTAIMLARRFAVDCNIILAGPGDKTPW

SEQ ID NO: 11759 - protein, 501 aa, Chorispora bungeana
MAIPMPTRQLFIDGEWREPILKKRIPIVNPATEEVIGDIPAATTEDVEVAVNAARRAFSRNKGKDWAKAPGALRAKHLRAIAAKVTERKSDLAKLEALDCGKPLDEAVWDMEDVAGCFEFYADLAEGLDAKQKAPVSLPMENFKSYVLKQPIGVVGLITPWNYPLLMAVWKVAPSLAAGCTAILKPSELASVTCLELADICREVGLPPGVLNVLTGYGAEAGGPLASHPGVDKIAFTGSFATGSKVMTAAAQLVKPVSMELGGKSPLIVFDDVDLDKAAEWALFGCFWTNGQICSATSRLLVHENIAPQFIEKLVKWSKNIKISDPMEEGCRLGPVVSQGQYEKILKFISTAKSEGATILHGGSRPEHQEKGFFIEPTIITDVTTSMQIWREEVFGPVLCVKTFGSEDEAIELANDSHYGLGAAVISNDTERCDRVSQAFEAGIVWINCSQPCFTQAPWGGVKRSGFGRELGEWGLDNYLSVKQVTLYTSNEPWGWYKSPN

SEQ ID NO: 11760 - protein, 481 aa, Burkholderia cepacia R1808
MMKIQNLIGGRHCDASTGRTFDKLAPATGDRICTVPASSADDVDRAVRAAHDALHDDAWARAGGAARARWLYRLADLVERESEALESLLAVEQGRPPAEMRMMDLPMTIDTLRYFAGWADKLEGRTIPTDGFMGRPTLSYTRRAPVGVAGQIVPWNAPLMIAVWKLAPALAAGCPVVIKPSEDAPLAVARLGKLACEAGLPAGVVNIVHGMGAEVGAALVAHPLVSKISFTGSTEVGRTIACDAARTFKRVTLELGGKAAQIVFADADLDRAIPSLVAGMFANQGQTCAAGSRVLAHRSIADALEARLADAARTIRVGPPTEAGVQMGALINPRHLARVRAHVAAALAEGAVMLAGDEQVPPRGCFMRPTILGGVHPGMRIAREEVFGPVGMVMPFETEDDAIRIANDTPFGLSASVWTQDVGTAHRVAERLDVGAVAINAWSPIDARLPWGGTRQSGIGRDLSKAALDSYLEEKIVTAAL

SEQ ID NO: 11761 - protein, 441 aa, Burkholderia cepacia R1808
MSSAAAGHTTPTVIIARGDGNYVYDVEGHRMLDGVGGLWNVNVGHNRPEVKAAIARQMDELSYYQTFDGVAHPRVYDLADRLCAMFEQEDMQRVMFGSGGSDAIETALKMARQYWVAAGEPSRTKFLSLRNGYHGVHMGGTSIGGNGVYHYNHGPLLPGCVLLDTPWLYRNPWNCDDPDQLVEHCIRQLEDTIAFHGQQTIAAFVAEPVQGAGGLIVPPASYWARVRNVCDRHGILLIADEVVTGFGRTGSMLGSRGWGVAADILCVAKGISAGYVPLGATLYNGRIAQAIEHGAGFSHVVMHGYTYSGHPLACAASLAVLDIVEAEDLPGNAARMGQRLLEQLLPLTRDFETVGDVRGKGLMLALDLVTDKASRTPLDPGKGFAARVADAARKRGVLVRAIANKIVMSPPLTLQPKETDLIAHALRDALQECCADARAIA

SEQ ID NO: 11762 - protein, 493 aa, Ralstonia solanacearum GMI1000
MALTFDQLRHTGLIRTDNLIDGRWSAGADGARYAVTDPATGSIIAQVADSSAADARAATDAAARALPAWRDTLPAERAAILRRWHAAIVANADALGRLISLEQGKPFAEGRGEVMYGASYVAWFADEATRIYGDLIPQQQRGKRMSAIKEPIGIVAAITPWNFPLAMIARKIAPALAAGCTVVAKPAEDTPLTALALAQLAQEAGLPPGVLNMIAASRERGVAAVADWLQDGRVRKITFTGSTPVGKHLARESAGTLKKLSLELGGNAPFIVFDDADLDAAIAGLLSAKFRNGGQTCVCPNRVYVQAGVYDRFAAMLAARVSALKVAPATDPDAQIGPMINARAVDKIERHVQDAVAHGARVLAGGKRLPEVGAHFYAPTVLADAHPGMALCGEETFGPVVPLFRFTDEAEAVQAANDTPFGLAAYFYSQDVRRIDRVAHALEAGIVGINEGALASEAAPFGGVKESGYGREGSKYGLDDYLSIKYLCQGGLA

SEQ ID NO: 11763 - protein, 687 aa, Zea mays
MARGLGAAPVSSCLALGAAAAVLLVAAALPSPASGVDVTAVLSAFPNFADFARLLASTPVASELSGRSSLTLLAVPNANLPQSPSAFVASAGADIADVLRYHVLLEYLSPFDLARLSPSGKLVTTLFQTTGRAPSDFGAVNLTVGGNSTVVVRSPAPSPGSNATVLGAVTAVPYNLSVLAVGGLIIPSGFDLAASESRPPPPVNITRVLTDARGFNVAASMLQASGVASEFEADEHGAGITVFVPTDDAFAGLPATDRLQSLPAERKAVVLRFHVLHSYYPLGSLEGPRRDLAVDPAAARAALVTCGGLCPGLNTVLRELVVGLQELYGVRHEVAEVVSSRDSYSKAPKSDVQCKNRIDTLKKKYKVEKAKHDSDWRYFDRLDDLLAPVLLKPNSSSSSAAAATAAAAARSAGPMVPPRINFPQRTRTPLHSSAGAKWRMPSPLPQPSASSDSSDGFPPSAVANGKRQRVEEPAAAAADNGAESSVSRAQGLRELAQAIRRLGEVYERVESAKRDQELRMERERLDSARQLEEQRVQFSTSMPRSSRITRTAQAPPGAMTTAATRTRKLRRMRKTKRKRASDCSPLQQWNAGAMFAKFSNITRVNGSIAIDTGIVQASITRTVFDQNPVAVFAVSKVLLPKEMFGRGDSGNTAMAPPSVAMAPRDAGSEKTPQTRLSSPPDLHSEDS

SEQ ID NO: 11764 - protein, 411 aa, Triticum aestivum
MGNEMSPLQKHRAEYRPELPPWLQGTAVKVEYGDAAIAADGADAHVIRRAFPHTYGQRLAHFLPKTANAPDATVITEHPAVRVGVVFSGRQSPGGHNVVWGLYNAINSHNPSSELIGFLGGTDGLFAQKTLEITEEVFSSYKNQGGYYMLGRTRDQIRTTEQVKAAMTTCQALKLDALVIIGGVTSNTDAAQLAETFAESKCSTKVVGVPVTLNGDLKNQFVETTVGFDTICKVNSQLISNVCTDALSAEKYYYFIRLMGRKASHVALECALQSHPNMVLLGEEVAASKLTISDITKQICDAVQARAEKDKYHGVVLIPEGLVESIPELYALLQEIHGLHDKGVSIENISSHLSPWASALFDFLPPFIRKQLLLHPESDDSAQLSQMETEKLLAQLVETEMNKRLEEGLTT

SEQ ID NO: 11765 - protein, 443 aa, Brassica napus
  misc_feature (22)..(22): Xaa can be any naturally occurring amino acid
  misc_feature (41)..(41): Xaa can be any naturally occurring amino acid
RKRTTPASRTRVGNYEMGRTLXEGSFAKVKYARNTVTVDIXSAAIKILDRDKILRHKMVEQLKREISTMKLIKHPNVVEIIEVMASKTKIYIVLELVNGGELFDKIAQQGKLKEDEARRYVHQLINAVDYCHSRGVIHSDLKPENLIPDANGILKVSDFGLSAFSLQVRGDGLLHTACGTPNYVAPEVLSDKGYDGAAADVWSYGIILFVLMAGYLPFDEPNLMTLYKRICKAEFSCPSWFSPGAKEVIKRILDPSPITRISIAELLEDEWFKQGYKPPSFGQDDEDITIDDVDAAFSNSKESLVTEKKAKPESMNAFELISSSNSLENLFEKQAQLVKKETRFTSQRPASEIMSKMEETAKPLGFNVRKDKYKIKMKGDKSGRKGQLSVATEVFEVAPSLHVVELRKTGGDTLEFHKFYKNFSSGLKDVVWNTDGAPEEHKA

SEQ ID NO: 11766 - protein, 116 aa, Gossypium hirsutum
MSLKLACVVVLCMVVGAPLAQGAVTCGQVTNSLAPCINYLRGSGAGAVPPGCCSGIKSLNSAAQTTPDRQAACRCIKSAAAGITGINFGLASGLPGKCGVNIPYKISPSTDCNRFV

SEQ ID NO: 11767 - protein, 372 aa, Streptococcus mutans
MAETNGLKDMIACDTRISAIKDNKLSYAGYDIADLMDNKTRFEEVIYLLWNLHLPTAIELKQFEEKLRKNYAISDAIEQCILIQSRQHLHPMSVLRSTVSLLGVYNLKAEERSVEATYDQSIQLMAKIPTIIATFARLRQGLSPIAPRKDLGFAANFLYMLNGRLPSELEILAMNRALVLHAEHELNASTFAARVCASTLSDIYSCVTTAIGTLKGPLHGGANERVFDMLREIREYGDVDSYLQEKLNSKEKIMGFGHRVYQTQDPREKYLREMARELTKGTEHDIWYQLSKKVEMCMKQKKNLIPNVDFYSATVYHVLGIDSSIFTLIFAMSRVSGWIAHIQEQQKNNKLIRPRSHYTGMRKLRYIPIERR

SEQ ID NO: 11768 - protein, 393 aa, Streptococcus mutans
MAEKVSFEEGKLQVPDKPVIPYIEGDGVGQDIWKNAQIVFDKAIAKVYGGHKQVIWREVLAGKKAYKETGNWLPNETLEIIKTHLLAIKGPLETPVGGGIRSLNVALRQELDLFACVRPVRYFKGVPSPLKHPEKTAITIFRENTEDIYAGIEWNAGTAEVQKVINFLQDDMQVKKIRFPKSSSIGIKPISIEGSQRLIRAAIEYALANNLTKVTLVHKGNIQKFTEGGFRKWGYELAKREYAAELASGQLVVDDIIADNFLQQILLKPERFDVVALTNLNGDYASDALAAQVGGIGISPGANINYQTGHAIFEATHGTAPDIAGQDLANPSSVLLSGCMLFDYIGWSKVSDLIMKAVEKAIANGQVTIDFAKELGVEALTTCQFSEVLLTYL

SEQ ID NO: 11769 - protein, 198 aa, Brassica rapa
MSASRFIKCVTVGNGAVGKTCLLISYTSNTFPTDYVPTVFDNLSANVIVDGNTINLGLWDTAGQEDYNRLRPLSYRGADVFLLAFSLVSKASYENVSKKWVPELRHYAPGVPIILVGTKLDLRDDKQFFVEHPGAVPISTAQGEELKKLIGAPAYIECSAKTQQNVKAVFDAAIKVVLQPPKNKKRKKRKSQKGCSIL

SEQ ID NO: 11770 - protein, 153 aa, Zea mays
  misc_feature (83)..(83): Xaa can be any naturally occurring amino acid
  misc_feature (117)..(117): Xaa can be any naturally occurring amino acid
MLLIVWSTTREDLSTQLSPIEAVNFQSEKMQQRKTTAAAAGRPSGTDGSDFSYRMVVDSRYTKVTKGRSRLRLLILVQATIYXLGLSCAFMTSTKNEERNTLGIASASIGLLFDSLXDFGCRRSRVNLLRLYTVPFTGGPWVFSLVFWLLGAD

SEQ ID NO: 11771 - protein, 175 aa, Triticum aestivum
MAPTVMASSVTSVVPFQGLKSTAGLPVSRRSNGASLGSVSNGGRIRCMQVWPIEGIKKFETLSYLPPLSTEALLKQVDYRIRSKWVPCLEFSKVGFIFREHNASPGYYDGRYWTMWKLPMFGCTDATQVINEVEEVKKEYPDAYVRIIGFDNMRQVQCVSFIAFKPPGCEESGKA

SEQ ID NO: 11772 - protein, 96 aa, Brassica napus
  misc_feature (91)..(92): Xaa can be any naturally occurring amino acid
MASSMLSSAAVVTSPAQAAMVAPFTGLKSSAAFPVTRKSNTDITSIASNGGRVSCMKVWPPVGKKKFETLSYLPDLTDVELAKEVDYLLRXXWIPC

SEQ ID NO: 11773 - protein, 506 aa, Zea mays
MAASAKGRLVPVLAVAAALAAVLLYRAPFSKSLGGEGCSLLPHDHFWIASDRVVTLGRVGPAAVEVKGGLINAIAVGDYRSFVLRRPLLDYGDAVIMPGLIDVHAHLDEPGRAEWEGFSNGTRAAAAGGITTLVDMPLNSFPSTVSEETLKLKLEAARDKLYVDVGFWGGLVPENAFNPSALEGLLKAGVLGLKSFMCPSGINDFPMTNSTHIEEGLVTLAKYKRPLLIHAERIPEAEDHDLQDDELDPRSYMTYLKSRPPSWEEAAIRDLQRAMKDTELGGRSEGAHIHIVHLSDAKTSLELMKDAKRSGASLSIETCPHYLAFSSEEVPDGDTRFKCSPPIRDDTNRENLWKALLDGHIDMLSSDHSPSTPDLKLMEEGDFLRAWGGISSLQFVLPVTWSYGRKYGITLNQLASWWSERPAKLAGQKNKGAILPGYHADIVVWKPETEFQLDNNHAIYHKHQNISAYLGKQLSGKVLSTFVRGNLVFAEDKHANAACGVPILAK

SEQ ID NO: 11774 - protein, 346 aa, Rhodopseudomonas palustris CGA009
MKAAVFEKTGERLVVRDVAAPALGDNELLLKVAFTGICGSDLHAAETPGMLQSGTVMGHEFTGEIVQSTASDWPVGARVAANPYWLCDACAAGGSCSGGGDAACANGSFMGFRPDLPGAYADYVRIRAGQAIRLPDKVSLRDGALMEPLAVARHAVDVCGPMQGADVLVIGGGPIGLGVVLMARDAGAARVVVSEPDPNRRACALEVGAVAAIDPIAEDLPTALGRLGIGAPGIVFECVGAPGFLQQTIDVMALRGRAVIVGVCMTEDRVLPRAAIRKEATLKFVLGYTMADFHHVSRYLEEHAATAAAMISRVVSLSELPEIFDRLRAEKSLIKVLVRPDQGSGT

SEQ ID NO: 11775 - protein, 1258 aa, Magnaporthe grisea 70-15
MAENENSGGIKDGSKDEGIGLEAFAAALVTGIAVFAVQITIFLLFRNKLARIYKPKTFLVPERERTDPPPASPWSLATSLLKISDRELIKKCGLDAYFFLRYLRMLLVIFIPIAFIVIPILVPINYVDGLGHEVVRDVKDNPPDVPRGLDTLAWPNLKPKNHQRRWAHLVMALAVIGWVCYIMFLELRIYIKVRQDYLTSAEHRLRASANTVLVSSIPEKWLTEDGLRGLFDVFPGGIRNIWITRDFTKLLEKVRKRDEIHDQLEAAQTELIREAKRRYLKKRIAEEKKGQGDKGRHRPTKDEIQKRQDEEDAEARLRAQQGGISAGTHEEVPHIDTAVEQDQRRNSYVPPEQDNADGSSKEAKGLGLGFIGKGIKGGVNVVGKAGHTLVGGAKTIQKGVDGQLEHTGGFGFLPGESRGPGSPVPPRPVTRGSDRRHRAAPMSSDIREETKKTSFDSDSGYQGHSPSGSKDEDLMVAGGTRPSSAQTRGNTTRKAMNLDGMIVNENNSWWKFWKAPSGGYASPVPQGREEDEFPLTGSSSSQKQKKTLWQRLLASLPLIGGEDIAPVEYPVSASEFAYSNDREDGAEWKKWLKESKRPTHRLPNFEWTPSWLPGLPLINKKVDTIYWARGELARLNMEIEIDQKHPERYPVMTSAFIQFNNQVAAHMACQSVTHHVPRQMTPRVVEVAPHDVIWENMAITWWDEWLRFAIVLALIVGMVILFIFPVVLSSGVSQIDTLVEAAPLLSFLSRNEKVYNFLKLVSGVLPAIILAIILAVVPLIFNYLAKLQGAKTGAQRSESVQVYYFAFLFFLLFLVVGLSTSAVSTLTAFFSANDAVNQVVGIPELLAKNLPKSANYFFTYMILQALSVSSGTLMQIGTLIVWYILGRLLDNTARAKWKRQTELPNVNWGSFFPVYTNFACIALIYSIVAPIIAIFAIITFSLLWLAHRYNMFYVTRFQTDTGGVLFPRAVNQLFTGLYVMELCLIGLFFLQTDERGNLVGFRQAIVMIVAMVITVGYQILLTKSFSPLFRYLPITFEDEAVLRDEAFQRAQDRRLGLVNDDPEDGDGDEAGMLRGDASGATREEIEMRRLSAKRRSVTGSAHGSKLGMLNPVAGIRHAGTWAVRAGKQIEHATLGKAEKNLKTAAQYRKERRMKDLEAQRAIGDALYGGFHDEIEDLTPDERDVLVREAFKHEALRSRRRAIWIPQDEIGVSDDEIYRTQSFSEYIWISNEGTALDSKTRVIYGRAPPDFSEMDLISL

SEQ ID NO: 11776 - protein, 449 aa, Pseudomonas putida
NMPEHAGASLASQLKLDAHWMPYTANRNFLRDPRLIVAAEGSWLVDDKGRKVYDSLSGLWTCGAGHTRKEIQEAVAKQLSTLDYSPGFQYGHPLSFQLAEKITDLTPGNLNHVFFTDSGSECALTAVKMVRAYWRLKGQATKTKMIGRARGYHGVNIAGTSLGGVNGNRKLFGQPMQDVDHLPHTLLASNAYSRGMPKEGGIALADELLKLIELHDASNIAAVFVEPLAGSAGVLVPPEGYLKRTREICNQHNILLVFDEVITGFGRTGSMFGADSFGVTPDLMCIAKQVTNGAIPMGAVIASTEIYQTFMNQPTPEYAVEFPHGYTYSAHPVACAAGLAALCLLQKENLVQSVAEVAPHFEKALHGIKGAKNVIDIRNFGLAGAIQIAPRDGDAIVRPFEAGMALWKAGFYVRFGGDTLQFGPTFNSKPQDLDRLFDAVGEVLNKLLD

SEQ ID NO: 11777 - protein, 168 aa, Triticum aestivum
MAPTVMASSVTSVDPFQGLMSTAGLPVSRRSDGASLGSVSNGGRIRCMQVWPIEGIKKFETLSYLPPFSTEALLKQVDYLIRSKWVPCLEFSKVGFIFREHNASPGYYDGRYWTMWKLAMFGCTDATQVINEVEEVKKEYPDAYVRIIGFDNMRQVQCVSFIAFKPPG

SEQ ID NO: 11778 - protein, 382 aa, Daucus carota
MRFTRVYTEVFNMTDHSLLCTETNNLCFDDLEARDDQDPRIDCENVVGNESEALICAVPLQRDEDFVFVFESKVNFCPEVIFSTDRSGELDLCVRKEALDWIYKAHAHYNFGALSVCLAVNYLDRFLSLYELPSGKKWTVQLLAVACLSLAAKMEEVNVPLTVDLQVADPKFVFEAKTIKRMELLVLSTLKWRMQACTPCSFIDYFLRKINNADALPSGSLIDRSIQFILKTMKGIDFLEFRPSEISAAVAICVTREAQTLDINKAMSNIIPVEKDRVFKCIEMIQDLTLVTETSNVASGRTRAQVPQSPVGVLDAACLSYKSDERTVGSCPNSSLHTETSPHTKRRKLIEIMKCGFYSITQFQIFSEWEFWCGCLCKRPPL

SEQ ID NO: 11779 - protein, 158 aa, uncultured bacterium pCosHE1
MKIISKDLRDGEKLPERHVFNGMGYQGDNISPHLAWDDVPAGTKSFVVTCYDPDAPTGSGWWHWVVANLPADTRVLPQGSGSDLVALPEGAIQTRTDFGKAGYGGAAPPKGETHRYIFTVHALDVEKIEVDEGASGAMVGFNVHFHSLESASITAMYS

SEQ ID NO: 11780 - protein, 483 aa, Burkholderia cepacia R1808
MSSGVRHDYAPLRLYIDGRFHDADGRRTQPVVDPGTTRVLGELPHATAHDIDAAVQAAHRAFVTWRHESPLVRSDLLRRAAALARERAETIGRHITMDQGKPLREAIAEVVSAAEQLEWHAEEGRRTYGRVVPARSPDVMQTVLREPIGVCAAFSPWNFPFSQAMHKIAAALASGCTLVLKGPEESPSAIVALAQLFHDAGLPPGCLNIVWGVPGDVSKQLIEAPQVRKISFTGSVPVGKQLAALAASLMKRMTMELGGHAPVLVCADADVERAAAMLAAYKFRNAGQVCVSPTRFFVQRAAFDRFVCAYLDAVGTIRVGYGLDAGVTMGPLAHARRVDEIDAFVADATAKGAQIATGGMRLPGPGHYFAPTVVLGPTRDTRLMNDEPFGPIVGIVPFDDLDDALAEANRLPFGLASYAFTTSARNAHRISRALEAGMVNINHFGMGPAEIPFGGVKDSGFGSEGGMEAFDGYLVTKFVTQMN

SEQ ID NO: 11781 - protein, 113 aa, Triticum aestivum
  misc_feature (37)..(37): Xaa can be any naturally occurring amino acid
  misc_feature (65)..(65): Xaa can be any naturally occurring amino acid
  misc_feature (75)..(77): Xaa can be any naturally occurring amino acid
  misc_feature (79)..(80): Xaa can be any naturally occurring amino acid
  misc_feature (83)..(83): Xaa can be any naturally occurring amino acid
  misc_feature (88)..(89): Xaa can be any naturally occurring amino acid
  misc_feature (99)..(99): Xaa can be any naturally occurring amino acid
  misc_feature (104)..(104): Xaa can be any naturally occurring amino acid
MSDSEEHHFESKADAGASKTYPQQAGTVRKNGFIVIXKNRPCKLWRFYLQRLGKHGHAKCTCRHXHIQWGKKFEXXXPXXHNXDIPQXXRTDYQLIIFXEEVWXLLLQIGTLR

SEQ ID NO: 11782 - protein, 431 aa, Ralstonia metallidurans CH34
MTSRQQQIEALQKDWDTNPRWKGVKRNFTAEDVVRLRGSVQIEHTLARRGAEKLWHLLNTEPFVNTLGALTGNQAMQQVKAGLKAIYLSGWQVAGDANLAGEMYPDQSLYPANSVPMVVKRINNTFQRADQIQWSEGKGDIDYFAPIVADAEAGFGGVLNAFELMKSMIDAGAAGVHFEDQLASVKKCGHMGGKVLVPTREAVAKLTAARLAADVSGVPTLVIARTDAEAADLVTSDVDERDQPFLTGERTVEGFFRSKPGIEQSIARALAYAEVADLVWCETGKPDLEFAKRFAQAVHAKFPGKLLAYNCSPSFNWKKNLDDATIAKFQKELGAMGYKFQFITLAGFHSLNYSMFNLAHGYARNQMSAFVELQEAEFAAAEKGFTAVKHQREVGTGYFDAVTQTIEGGQSSTTALKGSTEDEQFFEKKVA

SEQ ID NO: 11783 - protein, 513 aa, Solanum tuberosum
MALLHLPPVTQRRLQSFFLPYTDNHVSLVPDDSGDVAMNQILKIGVVLSGGQAPGGHNVISGIFDYLQTHCKGSTMYGFRGGPAGVMKGKYVVLTPEFIYPYRNQGGFDMICSGRDKIETPEQFKQAEETAKKLDLDGLVVIGGDDSNTNACLLAENFRSKNLKTRVIGCPKTIDGDLKSKEVPTSFGFDTACKIYAEMIGNVMIDARSTGKYYHFVRLMGRAASHITLECALQTHPNVTLIGEEVFAKKLTLKNVTDYIADVVCKRAESGYNYGVILIPEGLIDFIPEVQQLIAELNEILAHDVVDEAGVWKKKLTPQCLELFELLPLAIQEQLLLERDPHGNVQVAKIETEKMLIQMVETELDQRKQKGAYNAQFKGQFHFFGYEGRCGLPSNFDSTYCYALGYGAGSLLQSGKTGLISSVGNLAAPVEELTVGGTALTALMDVERRHGKFKPVIKKAMVELEGAPFKKFASKREEWALNNRYINPGPIQFVGPVANKVNHTLLLELGVDA

SEQ ID NO: 11784 - protein, 308 aa, Glycine max
  misc_feature (204)..(204): Xaa can be any naturally occurring amino acid
MASLVSSSVLLHLFLIISALHLGAAARILSEKDQQQQLQFQYHKGPLLSGKISVNLIWYGNFKPSQRAIISDFITSLSSHKSTAQPSVATWWKGTQKYYQLIKSSPKLTLTLGTQILDENYSLGKSLTNDNIVSLASKGASKDAINVVLTSSDVTVEGFCSSRCGTHGSSVGPRKFAYVWVGNSETQCPGQCAWPFQQPIYGPXNPPLVAPNNDVGLDGMVINVATLLAGTVTNPFGNGYFQGPKEAPLEAASACTGVYGKGAYPGYAGELLVDPTTGASYNANGVSDRKYLLPALFDPTTSACSTLA

SEQ ID NO: 11785 - protein, 265 aa, Zea mays
GCCSLPSLSWLSLRAPPPRIQAARQRGTVKWFNDTKGFGFISPEDGSEDLFVHQSSIKSEGFRSLAEGEEVEFSVSEGDDGRTKAVDVTGPDGSFVRGGGGGGGGGGGYGSRGGGGSGGGGRSYGGSWGGGRRSGGGGGPGACYKCGEPGHMARDCPSADGGGGYGGGGYGGGGYGGGGGGGGCFKCGEPGHMARDCSSGGGGYGGGGGGGGGGCYNCGQAGHMARDCPSGGGGGGGRFGGGGGGGDRSCYNCGEAGHIARDCPT

SEQ ID NO: 11786 - protein, 268 aa, Rhizobium etli
RVTHHTMVHEQMSRFFTGFRRDAHPMAVMCGCVGALSAFYHDSTDITDPHQRMVASLRMIAKMPTLAAMAYKYHIGQPFVYPKNDLDYASNFLRMCFAVPCEEYVVNPVLARAMDRIFILHADHEQNASTSTVRLAGSSGANPFACIAAGIACLWGPAHGGANEAALNMLNEIGTVDHIPEYIARAKDKNDPFRLMGFGHRVYKNYDPRAKIMQKTTHEVLGELGIKDDPLLEVAMELERIALTDEYFIEKKLYPNIDFYSGITLKAL

SEQ ID NO: 11787 - protein, 464 aa, Agrobacterium tumefaciens str. C58
MKELVDGKFAGLFGGVHVLPFFNPIDGADAGFDPTDHTIVDPRLGDWEDVRALSGSVEIMADLIVNHVSSQSGAFTDFIAKGSASEFADMFMTFDKVFPDGATEEDLLRIYRPRPGLPFSKVTLADGTQRMLWTTFTPEQIDIDVHSAKGTTYLETILDRFSEANVTAIRLDAAGYAIKKAGSSCFMIDDTYAFLEEVAGKARNRGMEVLVEIHSYHRDQIEIAKKVDRVYDFALPPLILHALFTGDATPLAKWLAISPRNAITVLDTHDGIGVIDVGAHSDGRAGLLEPQAIDNLVGEIHRRSDGQSRQATGAAASNLDLYQVNCTYYDALGRNDNDYLIARAIQFFAPGIPQVYYVGLLGGVNDMDLLAKTGVGRDINRHYYGNDEIGTALETPLFHRLSNLIRFRNTHPAFGGALKATIADAGALVLSWQHGDAFAELKISFADRKASIAASGQSEMQIVE

SEQ ID NO: 11788 - protein, 507 aa, Streptomyces avermitilis MA-4680
MTRFAAPGTDGAIVSYQARYDHFIGGEYVPPARGQYFENPSPVNGQPFTEIARGTAEDVERALDAAHAVAPAWGRTSVAERSDILRRIADRMEANLEKLAVAESWENGKPVRETLAADIPLAIDHFRYFAGAIRAQEGSLGEVDDDTVAYHFHEPLGVVAQIIPWNFPILMATWKLAPALAAGNAVVLKPAEQTPASIHYWLSLVADLLPPGVLNIVNGFGVEAGKPLASSPRVAKVAFTGETTTGRLIMQYASENITPVTLELGGKSPNIFFDDVWSANDDFRDKALEGFTMFALNQGEVCTCPSRALVQRGQYAEFMEAAVARTELIKTGHPLDTDTMIGAQASNDQLEKILSYLDIGRQEGAKILTGGERIEHDGELKGGYYVQPTIFEGDNRMRIFQEEIFGPVVSVTSFNDFDDAIKIANDTLYGLGAGVWTRDINTAYRAGRAIQAGRVWTNCYHAYPAHAAFGGYKGSGIGRETHKMMLDHYQQTKNLLVSYSPKKLGFF

SEQ ID NO: 11789 - protein, 176 aa, Gossypium hirsutum
LFSFILILTHFLLKSSIRIQVLGWICVAISVSVFAAPLNIMARVVRTKSVEFMPFTLSFFLTLSAVMWFAYGLFIKDLCVALPNVLGFILGMLQMLLYAIHRHSEKVNIEEKKLPAEQMKSINVVLTTLGASEVHPVVLDIHTDDTKEEDNKNNEPTGEPDKQTDVKMEDANESPV

SEQ ID NO: 11790 - protein, 434 aa, Bradyrhizobium japonicum USDA 110
MDAKASNKTATLTVGNKNYDLPIHSGSVGPDVIDIGKLYGQSGLFTYDPGFTSTASCQSKITYIDGDAGVLEYRGYPIEQLAENGDFLETCYLLLYGNLPTAAQKKDFDDRVIHHTMVHEQMARFFQGFRRDAHPMAVMVASVGALAAFYHDSTDINDPKQRMIASMRMIAKIPTLAAMAYKYTIGQPFVYPKNSLKFAENFLHMCFAVPCEEYKINPVLADALDKIFILHADHEQNASTSTVRIAGSSGANPFACIAAGIACLWGPAHGGANEAALAMLAEIGSVDKIPEFIAKVKDKNSEVRLMGFGHRVYKNYDPRAKIMQKMCHAVLKETGHGDDPMLKVAMELEKIALSDQYFIDRKLYPNVDFYSGITLKAMGFPVSMFTVLFAVARTVGWISQWSEMIEDPQQKIGRPRQLYTGVTRRDYVAIKDRK

SEQ ID NO: 11791 - protein, 475 aa, Wigglesworthia glossinidia endosymbiont of Glossina brevipalpis
MIDNLIWFRKDLRLNDNPALYYACVDEYKSASGILILNKKKWNEKIVSKNRIRFMYKNIFSLKRNLKKIGIELIFYTCRDFFEYTCLLYNFCYTNKVKELYFNKGIEKEDLEEDKIIIKKLKKITKCICFNGNLLIDPEKIKNKNKKTYKVYSYFLKSCISFISNNNINIIPFPKIRKNKLNLIKSYNDSIKIKKKLSPCYEEHALNKLNNFIKLKINKYHITRDFCINSTSFLSPYINIGVLSLRECINNIKNNNFDFIEKKNSGHFKWFSEIIWREFCHHLIIEYSDFFDSKKLIKWTKYIKWENKIKKIQAWKNGTTGFPIIDAAMRQLKKTGWMHNRLRMITSSFLVKDLLVDWKIGEKYFYYHLIDGNSAINNFNWQWISSSGICSSPYFRMINPITQSKKFKSIYKYIKFWIPELKNIPFNEIHEPYNWIIKNKINYPNQIIEHKTAKINFFKACKKAIYIFKSKNINK

SEQ ID NO: 11792 - protein, 331 aa, Ustilago maydis 521
MADNTTLEVDLDNVIDRLLEVRGSRPGKPVHLEEYEIKYLCLKARDIFINQPILLELEAPIKICGDIHGQYYDLLRLFEYGGFPPEANYLFLGDYVDRGKQSLETICLLLAYKIKYPENFFILRGNHECASINRIYGFYDECKRRFNIKLWKTFTDCFNCLPIAAIIDEKIFTMHGGLSPDLQSMEQIRRVMRPTDVPDTGLLCDLLWSDPDKDISGWSENDRGVSFTFGPDVVSRFLQKHDMDLICRAHQVVEDGYEFFAKRQLVTLFSAPNYCGEFDNAGAMMSVDETLLCSFQILKPAEKKQKYAYGGINMGRPVTPPRKQKKKSDGK

SEQ ID NO: 11793 - protein, 503 aa, Rhodopseudomonas palustris CGA009
MINIATRINPAIAPAVSEVISQLQARHLIGNTLVPSVGGATLDVIDPATGQVIGKAPAASGDDVARAVEAASAAFPGWAATPARQRGKLIAAAASAIAERSDVIATVLALETGKAIRTECRGEVATAIDITTMYAGLASELKGETLPFDPQILTYTSREPLGVVAAILPWNVPLVLMMLKIAPALVAGNTVVVKASEEAPYATIEMARLMARLLPDGVLNVICGTGRDCGAALVEHPAVAKVTFTGSQAVGELIYQMAAKKIIPVSLELGGKSPMIVYPDADMARVVAGAIAGMRFTRQGQSCTAASRIYVHTTLIDAFVAALREAVSKLKIGDPLDEATDIGTVISPRQKAKVESYIDLGARTAGAKVDRCGELPGAAHLKDGLFLQPTIITGVPEDSPLMREEIFGPVVCVQPWDDEDDVIARANDSDFGLAATVWTNDLRSALRTVQRLDAGYVQVNQNLTIQPNLSYGGFRKSGLGKEASLEAMLEHFTKKKTVVIDMR

SEQ ID NO: 11794 - protein, 353 aa, Apium graveolens
MMQNGIGMNQNMISGVGQSGISSANSTMMPTPGMGQQGQPGPQSLGMANNAAANMPLPSQTSNAMQSAQSKYVRVWEGNLSGQRQGQPVFITRLEGYRSASASETLAANWPSTMQIVRLISQDHMNNKQYVGKADFLVFRAMNQHGFLGQLQEKKLCAVIQLPSQTLLLSVSDKACRLIGMLFPGDMVVFKPQISNQQQHQQLQPQQHHPQLQHQQQLQQLQQQPLPQLQQQQQIPQLQQQQQIPQLQQQQQIPQLQQQIPQLQQQQQQQQQQISQIQQQQQIPQMQPQQQQQAPQMQQHIPQMQQQPSQQQQMVGTGMGQAYVQGQGRSQMVSQGQVTSQGPTMSGGGGYLS

SEQ ID NO: 11795 - protein, 300 aa, Triticum aestivum
MIEQVCTKKQAGTGPEFPGYRRPTRPTSLSSSSSVPPSHPRLIGVSAAAAMAKTYPVVSAEYQEAVEKARQKLRALIAEKNCSPLMLRLAWHSAGTFDVSSKTGGPFGTMKKPAEQAHAANAGLDIAVRMLEPMKEEIPTISYADLYQLAGVVAVEVSGGPVIPFHPGREDKPQPPPEGRLPDATKGSDHLRQVFGKQMGLSDQDIVALSGGHTLGRCHKERSGFEGPWDRNPLKFDNSYFTELLSGDKEGLLQLPSDKTLLTDPVFRPLVEKYAADEKAFFEDYKEAHLRLSELGYAEA

SEQ ID NO: 11796 - protein, 366 aa, Candida albicans SC5314
MATFAPHISKITKSSTKFNYGRIAKTFLGVAGSAAIATYFYNNGNPFNNNNNNNNNNEGSKNAAKALFGASAGANVKIAKVPEGKSASDYQKVYNDIATKISENLEFDENAGYYGQLLRLAWHTSGTYDKSDNSGGSYGGTMIFAPEEFDPENAGLQVGREFLMEFLVKYPWISRGDLWTLGGVAAVQESGGPKIEWRPGRVDDNTASKVPPNGRLPDASKDGKYVKDLFARMGFNERETVALLGAHVLGRCHKHNSGYDGPWGPSFNQFTNVFYTTLLGDWHVKKWDGKKQYEDDETGEFMMLPTDMALKEESYFLKYVKMYADDQDLFFKDFAKAFSKLISNGIKYPADSKPILFKTLDEQDEE

SEQ ID NO: 11797 - protein, 213 aa, Triticum aestivum
QRPVIVNIRATGICGSDVHYWTHGRIGHFVCEKPMVLGHESSGVVVSVADDVTSLKVGDRVALEPGVPCRVCEMCKLGMYNLCPDMAFAATPPYDGTLCNYYKHAADFCYKLPDHISLEEGALIEPLSVGIHASRRGGVKLSDRVFVFGAGPVGLLTAAAAKAAGASHVTIADRDPARLAFAKEYCADETIHLTGARRLDQDSNDFAKEEAEK

SEQ ID NO: 11798 - protein, 457 aa, Gibberella zeae PH-1
MALSYQQTKLIRGTIPALTDHGERITTIFYRNMLRDHPELNDYFNTVNQANGRQPRALTAVILSYANNINHITELIPKMERMCHKHCSLGIKPEHYAIVEKYLIAAFAEVLGPTMTTQIREAWTKAYWMLAKMLIGREAQLYRDFGKWQGYRKFRIEKKVEESDDIYSFYLVPVDGKRLPSFQPGQYVSVQIPIVDKGYVQSRQYSLSDAPRPDYYRVTVKRDEGIHMTRSGRYLGGDALNPGVVSNLLIDMKDEGDVVELAHPAGEFYLDMSNTSNVPIVLISAGVGVTPMMSILNTVSERQPHRPVSWIHGSRRSVPFYDQVRRIARNRSNFRTNIFKTHLAESDIFGVTYDHDFRMDLAKVSKDDLYLCHSSTEYYICGPEQFMLEMAEYLKAQKVDASRMHFELFSTGDMEFKVDNLSISSASKSPSIASAEQRCPSTGAVSADGATCPFSAV

SEQ ID NO: 11799 - protein, 380 aa, Gibberella zeae PH-1
MDSAARQQPQVQPCRYKVGKTLGAGSYSVVKECVHIDTGRYYAAKVINKRLMAGREHMVRNEIAVLKKVSMGHQNILTLVDYFETMNNLYLVTDLALGGELFDRICRKGSYFESDAADLVRATLSAVAYLHDHGIVHRDLKPENLLFRTPEDNADLLIADFGLSRIMDEEQFHVLTTTCGTPGYMAPEIFKKTGHGKPVDLWALGVITYFLLCGYTPFDRDSDFEEMQAILNADYSFTPIEYWRGVSAHAKDFIQRCLTIDSTKRITAHEALQHPFVAGFINAEGESQNLLPNIKKNFNARRTLHAAIDTVRAINKLREAQSGLMDGARSKEPSRGAAQQTPTNRKHPTSHPRCNPATTEIELSKLPKVSGAQRRAVRIR

SEQ ID NO: 11800 - protein, 167 aa, Ostreococcus tauri
MTVTLRSSDDETFVVDDDVALSETIKSIIEGARDGRDGVNGAKDGVRDADTEDESMVPLPNVSSKILAKVIEYAKFHVDAKKANEAEAKIKEFNTEFVKVDQATLFEIILAANYLNMKGLLDLTCMTVANMMKGKTPEEIRKTFNIKNDFTPEEEEEVRKENQWAFD

SEQ ID NO: 11801 - protein, 456 aa, Arabidopsis thaliana
MDQEEEEIEIPNYFICPISLEIMKDPVTTVSGITYDRQNIVKWLEKVPSCPVTKQPLPLDSDLTPNHMLRRLIQHWCVENETRGVVRISTPRVPPGKLNVVEEIKNLKKFGQEALGREETLQKLEVLAMDGNNRRLMCECGVHKSLILFVVKCTSEDEDGRRRIKGLDESLRLLHLIGIPSNDAKTILMENDRVMESLTWVLHQEDFLSKAYTIVLLRNLTEYTSSHIVERLNPEIFKGIIGFLKDVVNSVNRTSPTVRETVQSSSRPSLGKTEPSKLDHSLVIKQAVTAALMILLETSSWSRNRSLLVDLGAVSELIELEISYTGEKRITELMLGVLSRLCCCANGRAEILAHRGGIAVVTKRLLRVSPAADDRAISILTTVSKFSPENMVVEEMVNVGTVEKLCSVLGMDCGLNLKEKAKEILKDHFDEWKKFPCIDITLLTKLLSISPKGPKI

SEQ ID NO: 11802 - protein, 203 aa, Glycine max
  misc_feature (98)..(98): Xaa can be any naturally occurring amino acid
MADGPASPGGGSHESGDHSPRSNVREQDRYLPIANISRIMKKALPANGKIAKDAKETVQECVSEFISFITSELVCFFFSSDSFLLRFSYLSSPAFNLXFLEFCRASDKCQREKRKTINGDDLLWAMATLGFEDYMDPLKIYLTRYREMEGDTKGSAKGGDSSAKRDVQPSPNAQLAHQGSFSQNVTYPNSQGRHMMVPMQGPE

SEQ ID NO: 11803 - protein, 321 aa, Pseudomonas aeruginosa
MALNPDIAAYLELVGNGRSSGKSLPMHQLTVQQAREQFDQSSALMDPGLDEPLARVETLFVPARDGTPLPARLYSPQGLSASPPLPGVLYLHGGGYVVGSLDSHDALCASLAERAGCVVLSLAYRLAPEWRFPTAAEDAEDAWCWLAAEAARLGIDPQRLAVAGDSVGGSLCAVLSHRLALRGEASQPRLQVLIYPVTDASRTHQSIERYAVGHLLEKDSLEWFYQHYQRSPEDRQDPRFSPLLGVVPADLAPTLLLVAECDPLHDEGIAYAEHLRQGGARVELCVYPGMTHDFLRMGAIVDEADDAKDMIADALVAALAT

SEQ ID NO: 11804 - protein, 498 aa, Leptospira interrogans serovar Copenhageni str. Fiocruz L1-130
MQTALYISVLIISSCGLVYELLAGTIASYLLGETVTQFSLIIGTYLFSMGVGSWLSKYLEKDLIPKFLEIELAIGLVGGFSSAILYLSFGQIRYFQIPLFLLVILIGILVGLEIPVLLRILKKELQFKELVSRVLSLDYVGALLASILFPIFFAPKLGLMRTGFIFGILNVGVALWGTWVLPLRQSKIIILRAQSVVVLTLLILGFSYSDLITYYSEESLYTDEIILSKQTQYQRIIVTRWKNEIRLFLNGHLQFSSRDEYRYHETLVHPALLAHPTPKKVLVLGGGDGLAVREILKHKNVESVTLVDLDSAITNLFSEHGILKKLNEESLKNSKVTVINTDAFLWLEESDQIFDVVLIDFPDPSNFSLGKLYTTAFFHTLKRRMNETSVLEIQSTSPLFARSSYWCIERTIASLGFYTLPLHVYVPSFGEWGFVLAGQRPIQFKKDFPKDLKFLNIQELESIQTFPQDMSRVPVEINRLDNQALVRYYDREWNRILD

SEQ ID NO: 11805 - protein, 176 aa, Zea mays
VSTIARYGPATTFTEPVRKWYKEWVPVVAADVNTNASANGGAAPSTGTGSGGGSRGSDLLLFKWTPVNGANGGGGEGEQHQAAETATRRRRYVPVSLMEEQRQESTKSDDENKANDGDPSSNETEPSNEFSDINGTPMDESQASDEDGRNSGKNGGETDLNLNLGFERPGPVIIEI

SEQ ID NO: 11806 - protein, 222 aa, Bacillus cereus ATCC 14579
MRFFIDTANLEDIKKAYKLGVLAGVTTNPSLVAKEGVKFEDRIAEICQAVPKVESVSAEVTPDAVTAEEMIAQAEELIKINGGDKNVTIKLPMTLAGLEACRYLTEKGVKTNVTLIFTVNQALLAARAGATYVSPFLGRLDDISEDGVLLVAKIAELFDVHQLDTQIIAASVRHPDHVTRVAMAGAHIATIPYKVIEQLAMHPLTDQGIEKFAADWAKAPKL

SEQ ID NO: 11807 - protein, 501 aa, Arabidopsis thaliana
MANLRLMITLITVLMITKSSNGIKIDLPKSLNLTLSTDPSIISAASHDFGNITTVTPGGVICPSSTADISRLLQYAANGKSTFQVAARGQGHSLNGQASVSGGVIVNMTCITDVVVSKDKKYADVAAGTLWVDVLKKTAEKGVSPVSWTDYLHITVGGTLSNGGIGGQVFRNGPLVSNVLELDVITGKGEMLTCSRQLNPELFYGVLGGLGQFGIITRARIVLDHAPKRAKWFRMLYSDFTTFTKDQERLISMANDIGVDYLEGQIFLSNGVVDTSFFPPSDQSKVADLVKQHGIIYVLEVAKYYDDPNLPIISKVIDTLTKTLSYLPGFISMHDVAYFDFLNRVHVEENKLRSLGLWELPHPWLNLYVPKSRILDFHNGVVKDILLKQKSASGLALLYPTNRNKWDNRMSAMIPEIDEDVIYIIGLLQSATPKDLPEVESVNEKIIRFCKDSGIKIKQYLMHYTSKEDWIEHFGSKWDDFSKRKDLFDPKKLLSPGQDIF

SEQ ID NO: 11808 - protein, 395 aa, Methanosarcina acetivorans C2A
MNEQGLSEKEIFSYLENAKSEDTDYYRVLSSMCTHPHKIAVEANRLFIEANLGDLGLFAGASRLEQEVVGMLGELLHAPSIDVPFGGSCESSACGYLTTGGTESNIQAVRGMKNLVTTGKKELKGAPNIVIPESAHFSFDKVADMMGIEVRRASLDSEFRVDMASIESLIDANTIGLIGIAGNTEFGQIDPIDKLSEIALENELFLHIDAAFGGFVIPFLEKPQPFDFKLPGVTSIAVDPHKMGLSTIPSGALLFRSASFLDSLKVNTPYLTTKAQFTLTGTRSGASAAATCAVMKYLGNEGYRKNVQYCMQLTEKLVIEARKIGFEPLLEPVMNVVALKVPNPDFVREQMLERFGWNVSITRTPRALRLVLMPHNTLEDIEIFVQDLKEVTVEI

SEQ ID NO: 11809 - protein, 389 aa, Brassica napus
MNRGALESSPVQQLMVAGNPNWWNVSGSTRPPPPLMGHQQGPLPPQMTPNNNYLRPRMMMTSSSPSLLDNPSLSSWLESNDLPPESWSLSQLLLGGLMMGEEERLEIMNHHSHHDEQHHHSFQGKMRLENWEEQVLRHQQASMGVVDIKQESNINNNNGYLISSPNSPPNKSCVTTTTTTSLNSNDNTNNNNNMLGFSSNHNGLNLSEIRHTPPDRSSECNSLDIGGSTNKKPRLQPSPSSQSTLKVRKEKLGGRIAVLHQLVSPFGKTDTASVLSEAIGYIRFLQNQIEALSHPYFGTTASGNMRNQHLQGDRSCLFPEDPGQLVTDQCVKRRGVSSSSSENQNAKEEPKKDLRSRGLCLVPISYTLQVGSDNGADYWAPTLGSASFH

SEQ ID NO: 11810 - protein, 161 aa, Zea mays
SAISSFNERPIILALSNPTSQSECTAEQAYTWSKGQAVFATGSPFDPVEYNGKIHVPGQANNAYIFPGFGLGVVMSGAIRVHDDMLLAASEALAQQVTEENFEKGLIYPPFSNIRKISAHIAASVAAKAYELGLASRRPRPKDLVKYAESCMYSPIYRNYR

SEQ ID NO: 11811 - protein, 217 aa, Glycine max
MASLALETEDVISDIYLSLGLKESDKGVGVPRVLSLLSSLLERSVQRNETALEAKHVKDVVTVFHGLRAPTLSVRKYIDRIFKYSGCSPSCFVVAHIYVDRFIQHTEIKLTSLNVHRLLITSIMLAAKFIDDAFYNNAYYAKVGGVSTSELNRLEMSFLFGIDFRLQFSVDTFGRYCRQLEKEAAEVVQIERPMQACRIKESWSNKDDPTCASTIAR

SEQ ID NO: 11812 - protein, 231 aa, Lycopodium annotinum
MGRGKIEIKRIENATSRQVTFSKRRGGLLKKAHELSVLCDAQVALIIFSSTGKLFEYASPSMKEILDRYGKYPEGVQTGTVTDPNNDVMLQYLNREVIRMKQQIERTHQTQRHMMGEDLAILPLKDLQQLEEQLDIGLRRIRARKDQLLVEQLEELHRKERHWLEENEALRRKLAGGQALSGPVPSPLSIVNPLETREPPSLGTVSLPFSVQFNQQNMQDTPNLQTSLQLG

SEQ ID NO: 11813 - protein, 479 aa, Pseudomonas putida
MSLLIRGATVVTHEESYPADVLCADGLIRAIGQNLEPPTDCEILDGSGQYLMPGGIDPHTHMQLPFMGTVASEDFFSGTAAGLAGGTTSIIDFVIPNPQQSLLEAFHTWRGWAQKSASDYGFHVAITWWSEQVAEEMGELVAKHGVNSFKHFMAYKNAIMAADNTLVASFERCLQLGAVPTVHAENGELVYHLQKKLLAQGITGPEAHPLSRPSQVEGEAASRAIRIAETLGTPLYLVHISSREALDEIAYARGKGQPVYGEVLPGHLLLDDSVYRDPDWATAAGYVMSPPFRPREHQEALWRGLQSGNLHTTATDHCCFCAEQKAMGRDDFSRIPNGTAGIEDRMAVLWDAGVNSGRLSMHEFVALTSTNTAKIFNLFPRKGAIRVGADADLVLWDPQGTRTISAQTHHQQVDFNIFEGRTVRGIPSHTISQGKVLWADGDLRAEPGAGRYVERPAYPSVYEVLGRRAEHQRPMPVQR

SEQ ID NO: 11814 - protein, 237 aa, Lycopodium annotinum
MGRGKIEIKRIENATCRQVTFSKRRSGLLKKAHELSVLCDAQVAVIIFSSTGKLFQFASTRMKEILERYERNSDPLQIDAVIPRDLEYWSREAAKAKDELDRCHQKNRHMLGEDLSALNLNELEELEQQLDSGLRRVRCRKDQVLRDRIEELTKQESFLREENRMLRSKIAVPKESTEPILDEMNMETREPPSMAIVEEELSLKLNSKTWPDIHFSLQLGQYQPPRTETPTANHRPN

SEQ ID NO: 11815 - protein, 240 aa, Triticum aestivum
MGDRPKLPARYEQVKLLGEGNFAKVYLARHMDTKEEVAIKVMDKEKLIKLGAVQQIKREIAVMRRLRHPNIVQLHKVMACKSRIFVVMEYVRGGPLYRHIPANGGLKEDETRRIFQQLVSALTFCHAQGVYHRDIKPDNLLVDEHGNLKVADFGLSAHADTARREALLHTVCGTPLYVPPEVFARRGYDGAKADAWSCGIVLFVLAAGRKPFRDDDFITLYRTICRGDYRCPRTFSPELV

SEQ ID NO: 11816 - protein, 117 aa, Triticum aestivum
  misc_feature (60)..(60): Xaa can be any naturally occurring amino acid
  misc_feature (72)..(72): Xaa can be any naturally occurring amino acid
MAPAVMASSATTVAPFQGLKSTAGLPVSRRSSGSLGSVSNGGRIRCMQVWPIEGIKKFEXTLSYLPPLSTEXLLKQVDYLIRSKVGACLQFSKGLLRPLSKKPPGLLVEYWDKCWLP

SEQ ID NO: 11817 - protein, 324 aa, Triticum aestivum
MEAETAAKRARENEGAAAADGAGEQAGISAVIPGWFSEISPMWPGEAHSLKVEKVLFQGKSDYQDVLVFQSSTYGKVLVLDGVIQVTERDECAYQEMITHLPLCSIKDPKKVLVIGGGDGGVLREVSRHSSVEQIDICEIDKMVVDVSKQFFPHLALGFEDPRVSLHIGDGVAFLKNAPEGTYDAVIVDSSDPVGPAQELFEKPFFQSVSRALRPGGVVCTQAESIWLHMHIIEDIVTNCRQVFKGSVNYAWTTVPTYPSGVIGFMLCSTEGPSVDFQHPVFSIEEDEYSTKSKGPLKFYNSEFHTASFCLPSFARRVIEAKAN

SEQ ID NO: 11818 - protein, 127 aa, Brassica napus
  misc_feature (125)..(125): Xaa can be any naturally occurring amino acid
MTRVTRDFRDSLHKEVVPAAAVSADVRFASSRFPNYRIGANDQIFDVKDDPKVLSMKEVVARETAQLMDQQKRMSVRDLANKFEKGLAAAAKLSEEAKLKEATSLEKHVLLKKLRDALESLRGRXAG

SEQ ID NO: 11819 - protein, 224 aa, Candida albicans SC5314
MSSDKSNLLKKYKIVFLGDQSVGKTSLITRFMYDTFDETYAATIGIDFLSKTMYLEEGKTIRLQLWDTAGQERFRSLIPSYIRDSHVAVICYDITNKKSFDNLDKWIKDVKLERGDDVIIVLVGNKSDLASDKRQVSLDDVENLQIKIGAKFFIETSTKANHNVKLLFKKIAQSLPDFNQDSNDKSNDNNNNNNNNNNNNNQSETIDITIDNTAPNPQGTSTCC

SEQ ID NO: 11820 - protein, 375 aa, Pseudomonas putida KT2440
MAEAKVLSGAGLRGQVAGQTALSTVGQAGAGLTYRGYDVRDLAAGAEFEEVAYLLLYGELPTQAELADYKRKLKGLRDLPQALKEVLERIPRDAHPMDVMRTGCSVLGTLEPELTFEAQRDKTDRLLALFPAVMCYWYRFTHHGVRIDCTTDEDTLGGHFLHLLHGKKPSELHVKVMNVSLILYAEHEFNASTFTARVCASTLSDLYSCVTAAIGSLRGPLHGGANEAAMELIERFQSPQEATAELLRMLERKDKIMGFGHAIYKESDPRNEVIKGWSKQLADEVGDKVLYPVSEAIDKTMWEQKRLFPNADFYHASAYHFMGIPTKLFTPIFVCSRLTGWAAHVFEQRANNRIIRPSAEYVGVEQRQFVPIEQR

SEQ ID NO: 11821 - protein, 199 aa, Triticum aestivum
MAMEKNQDSKVIMGRYKLGRLLGRGSFAKVYKAHNISTGEFVAIKVFDKEAVHRSGTVEQVKREVDVMRRVHHPNVVRLHEVMATRSRIYFVMEYASGGELFDRLAKSTRFPEPVARRYFQQLVTAVEFCHSRGVYHRDLKPENLLLDAHGNLKVSDFGLSALADGASRHRGDALLHTTCGTPAYVAPEVILKRGYDGA

SEQ ID NO: 11822 - protein, 66 aa, Zea mays
MQNPNAATCEHKEEMDSRLVFGGNVYYTCTPDEVQQYFNFFGTVNKLTILTDNFGQPKVAAYAEFA

SEQ ID NO: 11823 - protein, 279 aa, Synechocystis sp. PCC 6803
MALIQWYPGHIAKAERQLREQLNKVDVVLEVIDARIPLASQHPDVPLWVGEKPKLIILNRVDMITPELQEQWLTWFRQQNQTVYYANAKQGTGVKAISKAAQQAGKAVNERRQRRGMQPRPVRAVVMGFPNVGKSALINRLLGRKVVESARRAGVTRQLRWIRISDSLELLDSPGVIPLKLENQANALKLAICEDIGEAAYENQAVAIAMVDLLLDLSLGEALTQRYQVPPEAMNGDLYLIALADARHNGDRERAAVQLLNDFRKGLLGPLPLELPPEV

SEQ ID NO: 11824 - protein, 480 aa, Neisseria meningitidis Z2491
MKQLAMYINGRFENDFNGEWRNVLNPSTEEAIAREPKGGKADVDRAVAAARAAQPAWERLPAVERGAYLRKIAQGIRERADELTDTIVAEGGKTKDLARVEVMFTADYLDYQAEWARRYEGEIIQSDRPRENILLFKRPLGVIAGILPWNFPFFLIARKMGPALVTGNTIVVKPSSVTPINCHIFAEIVDAVGLPAGVFNVVNGPGAEIGNALSAHPQVDMVSLTGSVEAGRQVMEAASANITKVSLELGGKAPAIVLKDADLDLAVKSILASRVGNTGQICNCAERVYVHSSLKDAFIEKMTAAMKGVRYGNPAEAEAGALEMGPLIEERAVKAVAEKVERAVKQGAKLVCGGKRAEGRGYFFEPTLLTDTDNSMDIMKEETFGPVLPVSAFDTLDQVIALANDCEFGLTSSVYTTNLNEAFYVTRRLQFGETYINRENFEAMQGFHAGWKKSGIGGADGKHGLEEYLQTQVVYLETDI

SEQ ID NO: 11825 - protein, 238 aa, Oryza sativa (japonica cultivar-group)
MFIRMRAASTTSSSEPCRRLSPPSSKRPAGRTKFHETRHPVFRGVRRRGRAGRWVCEVRVPGRRGCRLWLGTFDAADAAARAHDAAMLALRGRAAACLNFADSAWLLAVPPPATLRCAADVQRAVARALEDFEQRESSSSVFPLAIDVVAEDAMSATSEPSAASDDDAVTSSSSTTDADEEASPFELDVVSDMGWSLYYASLAEGLLMEPPASGASSDDDDDAIVDSSDIADVSLWSY

SEQ ID NO: 11826 - protein, 214 aa, Listeria innocua Clip11262
MRFFIDTANVEEIKKANRMGFIAGVTTNPSLVAKEGRDFNEVIQEITSIVDGPISGEVVSLNAEEMIEEGRVIAKIHPNMVVKIPMTGEGLAAVKVLTEEGIKTNVTLVFSATQALLAARAGATYVSPFLGRLDDIGDDGLVLIRDIAEIFETHGIPTEIISASVRHPIHVIECAKAGADIATVPYKVFEQMLKHPLTDSGIDKFLADWEAAKK

SEQ ID NO: 11827 - protein, 158 aa, uncultured bacterium pCosHE2
MKLISNDLRDGDKLPHRHVFNGMGYDGDNISPHLAWDDVPAGTKSFVVTCYDPDAPTGSGWWHWVVVNLPADTRVLPQGFGSGLVAMPDGVLQTRTDFGKAGYDGAAPPKGETHRYIFTVHALDIERIDVDEGASGAMVGFNVHFHSLASASITAMFS

SEQ ID NO: 11828 - protein, 92 aa, Triticum aestivum
MVLPSEQKARYSTEEDPSRCSCSDSFFGKYFSFLLLMFVTASLVILPLVLPPLPPPPSMLMLVPVAMLVMLLVLAFMPTSGGRGATGPTAYL

SEQ ID NO: 11829 - protein, 96 aa, Zea mays
MNSFSAQVQKPTPTTTGPQLVTVASVDASSSIEQRGGREMKEGTANCIDILIAIILPPLGVFLKFGCKVEFWLCLLLTFLAYLPGIIYAIYVITKD

SEQ ID NO: 11830 - protein, 75 aa, Glycine max
MPTRCEICCEIMIAILIPPLGVCFRHGCCSVEFIICLLLTILGYIPGIIYALYAIIFVDRDQYFDEYRRPLYAQY

SEQ ID NO: 11831 - protein, 164 aa, Cicer arietinum
LVAGEAGTGIAELIALEMSKQTKTPIEETRKKIWLVDSKGLIVSSRANSLQHFKKPWAHEHEPVGTLIDAVKVIKPTVLIGSSGVGKTFTKEVIEAMTSNNEKPLILALSNPTSQSECTAEEAYTWSEGRAIFASGSPFDPVEYNGKVYYSGQSNNAYIFPGFG

SEQ ID NO: 11832 - protein, 427 aa, Escherichia coli
MADTKAKLTLNGDTAVELDVLKGTLGQDVIDIRTLGSKGVFTFDPGFTSTASCESKITFIDGDEGILLHRGFPIDQLATDSNYLEVCYILLNGEKPTQEQYDEFKTTVTRHTMIHEQITRLFHAFRRDSHPMAVMCGITGALAAFYHDSLDVNNPRHREIAAFRLLSKMPTMAAMCYKYSIGQPFVYPRNDLSYAGNFLNMMFSTPCEPYEVNPILERAMDRILILHADHEQNASTSTVRTAGSSGANPFACIAAGIASLWGPAHGGANEAALKMLEEISSVKHIPEFFRRAKDKNDSFRLMGFGHRVYKNYDPRATVMRETCHEVLKELGTKDDLLEVAMELENIALNDPYFIEKKLYPNVDFYSGIILKAMGIPSSMFTVIAAMARTVGWIAHWSEMHSDGMKIARPRQLYTGYEKRDFKSDIKR

SEQ ID NO: 11833 - protein, 482 aa, Candida albicans SC5314
MGSNSSKSAPTLQRSDTNNSTRSTRSNRSIRSRRSISSIKDSQQQQSDSQQQQEEEEEQSQSQQRPQPILSRNNSATSENPILIRRNTNETLQTPNFSDTLSPHSHSQQQQQQPGSPLSTSMNGNTISRTSTNHSIISTTSHKSSSQQSNLPLKKETTTSSLSTNSNTIDIDSLIDKLLNAGFSGKRTKNVCLKNTEIELICASAREIFLSQPSLLELAPPVKVVGDVHGQYHDLIRIFSKCGFPPKTNYLFLGDYVDRGKQSLETILLLLCYKIKYPENFFLLRGNHECANVTRVYGFYDECKRRCNIKTWKLFIDTFNTLPIAAIVAGKIFCVHGGLSPVLNSMDEIRNIARPTDVPDFGLLNDLLWSDPADTINEWEDNERGVSYVFSKVAINKFLSKFNFDLVCRAHMVVEDGYEFFNDRTLVTVFSAPNYCGEFDNWGAVMGVSEDLLCSFELLDPLDSAALKQVMKKEKQERKKST

SEQ ID NO: 11834 - protein, 126 aa, Zea mays
MPVAASLMAIELEKDQLAWAEQQRQQNRRQTMVVCRKSAAAVAKGQQRQNASPPSPKPPPAGGLSAEAFLVLACVAVSLIVLPLVLPPLPPPPPLLLLVPVCLLLLLAALATFVPSDVRSMPSSNL

SEQ ID NO: 11835 - protein, 279 aa, Bacillus cereus ATCC 14579
MKNLQSKTVLSNGVEMPWFGLGVFKVEEGPELVEAIKSAIKAGYRSIDTAAIYGNEAAVGEGIRAGIETTGISREELFITSKVWNADQGYEETIAAYEESLKKLKLDYLDLYLVHWPVEGKYKDTWRALETLYKEKRVRAIGVSNFQIHHLQDVIKDAEIKPMINQVEYHPRLTQKELQAFCKEQGIQMEAWSPLMQGQLLDNETLQEIAEKHGKTTAQVILRWDLQNGVITIPKSTKEHRIIANADVFNFELTKEDMEKIDALNQNHRVGPDPDNFDF

SEQ ID NO: 11836 - protein, 170 aa, Triticum aestivum
  misc_feature (139)..(139): Xaa can be any naturally occurring amino acid
  misc_feature (144)..(144): Xaa can be any naturally occurring amino acid
  misc_feature (155)..(155): Xaa can be any naturally occurring amino acid
  misc_feature (161)..(161): Xaa can be any naturally occurring amino acid
  misc_feature (164)..(165): Xaa can be any naturally occurring amino acid
  misc_feature (167)..(167): Xaa can be any naturally occurring amino acid
MSHRMMMNPVKVEGDGRAGGGGAPRPMDGLGDAGPTPFLAKTYDMVDDPATDAVVSWSATNNSFVVWDPHLFATVLLPRYFKHGNFSSFVRQLNTYGFRKVDPDRWEFANEGFLRGQRHLLRNIKRRKPNMGSKNNNLXVLLEXGNFGHDVEIDXLKRDRXLLXXEXVKL

SEQ ID NO: 11837 - protein, 157 aa, Carica papaya
MDVRMFVLESPILSSLRQLMELQDTETEKSFNAPTRTYVRDAKAMAATPADAKEYPNSYVFVIDMPGLKSGDIKVQVEDDNVLQISGERKREEEKDGVKYLRMERRIGKFMRKFSLPDNANTDAISAVCQDGVLTVTVQKLPPPEPKKPKTIEVKIA

SEQ ID NO: 11838 - protein, 386 aa, Aspergillus parasiticus
MTGLDMETIFAKIKEEYARTDDVGKRQIQGHIRELQVGFYSDWDVVMRLSSGPLQVALTKVGIDLGIFRSLKESDTPITLAEIVKKTGASPRLLGRILRTQAAFGLIKETGPQEYTSSAFTDVFANSDAAGAVVQLFDISGPCTQILPDFLAERNYQDITSNKDCVFQKAFGSDLTMFEWMPQHPKHMESLGHLMALERPVSWVDHYPVLEELGGFPAPDKVLMVDIGGGFGQQSKALRAKFPDLPGRLIVQDIPQTLANAQPAAGIEFMEHNFFEPQPIQNAKFYYLRHVFHDWPDEQCVLILKQIIPAMGPESQILIDEMVIPSTGVPWQAAFTDLLMMNSLGGVERTRAEWDDLMEQVGLEIIQSKVYDSKEQAILVAVPKRT

SEQ ID NO: 11839 - protein, 251 aa, Corynebacterium efficiens YS-314
MEYGTPPPPSTSPTPDATCAHGLSNFPHCDEHHPRLPRQYAPQSGAELVLPRTSSPLTPHPHRTTCSHPVNPILTGYTEVLHRGKCQTHTSNPTGTGPRDLTRGELFSRGDYRWEGFHGTLDDGRGFYAQCLGARRRCTRERPVFFTRAVTAGVDGHRGVLTTRTSVNHAGERSITSSEIKVIHMAQGTVKWFNAEKGFGFIAPSDGSADVFVHYSEIQGNGFRNLEENQQVEFELGEGAKGPQAQQVRAL

SEQ ID NO: 11840 - protein, 319 aa, Escherichia coli O157:H7 EDL933
MKPENKLPVLDLISAEMKTVVNTLQPDLPPWPATGTIAEQRQYYTLERRFWNAGAPEMATKAYMVPTKYGQVETRLFCPQPDSPATLFYLHGGGFILGNLDTHDRIMRLLASYSQCTVIGIDYTLSPEARFPQVIEEIVAACCYFHQQAEDYQINMSRIGFAGDSAGAMLALASALWLRDKQIDCGKVAGVLLWYGLYGLRDSVTRRLLGGVWDGLTQQDLQMYEEAYLSNDADRESPYYCLFNNDLTREVPPCFIAGAEFDPLLDDSRLLYQTLAAHQQPCEFKLYPGTLHAFLHYSRMMKTADEALRDGAQFFTAQL

SEQ ID NO: 11841 - protein, 170 aa, Zea mays
LRMEVDRQPVQPAIHAPGVTGRRREDQMVPSMTSSFIRAETELTADFGHTSEDSRPEVPSNIHHLQARPEREETVDGGTGNAVRVHGNHHQQNLQNNMHRVLGIAPSISEASSSWTGRDGGVVPVWSPPAASGHSDPYAADEADISSRGYLDRHPQSHTMMNWSQLSQSL

SEQ ID NO: 11842 - protein, 478 aa, Streptomyces avermitilis MA-4680
MASAFEYAPAPESRSVVDIAPSYGLFIDGEFTEAADGKVFKTVSPSTEEVLSEIAQAGEADVDRAVKAARKAFEKWSALPGSERAKYLFRIARIIQERSRELAVLETLDNGKPIKETRDADLPLVAAHFFYYAGWADKLDHAGFGANPRPLGVAGQVIPWNFPLLMLAWKIAPALATGNTVVLKPAETTPLSALFFADICRQAGLPKGVVNIIPGYGDAGAALVEHPDVNKVAFTGSTAVGKAIARQVAGTEKKVTLELGGKGANIVFDDAPIDQAVEGIVTGIFFNQGQVCCAGSRLLVQESVQDELLDSLKRRLSTLRLGDPLDKNTDIGAINSAEQLSRITSLVDQGEAEGAERWSPACELPSSGYWFAPTLFTNVTQAHTIARDEIFGPVLSVLSFRTPDEAVAKANNSQYGLSAGIWTEKGSRILAVASKLRAGVIWANTFNKFDPTSPFGGYKESGFGREGGRHGLEAYLDV

SEQ ID NO: 11843 - protein, 147 aa, Zea mays
MVGRRRVALDLCGVRHTSISKLATGLSGFIAQKRRTVCVLKLSEVRLGNSDGYQHGQCWRDVYDAICQARRLIYIIGWSMFHTIHLVRDGHDDMALGDLLRRKSQEGVQVLLLVWDDPTSRRLLGIKMEGYMGTRDEETRRFFKHSS

SEQ ID NO: 11844 - protein, 142 aa, Campylobacter coli
MTQEQIQIIKDCVPILQKNGEDLTKEFYKIMFNDYPEVKPMFNMEKQASGEQPKALAMAILMAAKNIENLENMRSFVDKVAITHTKLNVKEEHYPIVGACLLKAIKVVLYADETTLKAWEEANKAIAQFYIDIEKEIYAKAK

SEQ ID NO: 11845 - protein, 453 aa, Ustilago maydis 521
MTLELPTETTHLSDSLLAEFARHTTIDIDNNVASIAAQHNLAHRRLLELDETKHTNRAQIDQQVVNEFQSLFHDMTSNQIIVLSTYSELLTNDKNKAAKLVEMCVAAAKQIKGGMWNGKQLSSTVLERISVDGLTGAESDEEKHQQLASDILTVHFGLEMLPNLLASGNLHAQTATSQAYNASATVRHARRFVALYELISGDTVDSSRVCIKIPTTIAGLQAMRFLSSGGILDENNVGGPLLEGKIQVLATTVFAVEQGLAAAQAAGATYVAPYINALAAHFFDAENPSAEDKQKALDAGGRSISEIIYPLQRCLRRMRQQNNKIKTKVMAASFINAEEAIELCGLDHVTLGAGIVQALATTKLTDGIVETMHQASDKMRIAEEKELERYCATLAAIKDGEAQGCGGWLKQGHRSHARLEIVLTQDERCRYMLADALARFTSAEVKLRQLFVV

SEQ ID NO: 11846 - protein, 497 aa, Brucella suis 1330
MTQENKMGKHENKAGGASLLHYGNFIAGQWQDAVGGEHITLKNPSDGSDLAPIARGAKADIDLAVVAARSALSGDWGKLTATERGRILHRISEEVLKNIDLLTDLESKDVGKPVTQARADVVALARYLEFYGASADKVHGDTLPYQNGFTVLSIYEPHGVTGHIIPWNYPMQILGRSLGAALAMGNAAVVKPAEEACLTILEFARIAEKAGLPKGALNVVTGFGAEAGAALCEHPDVNHISFTGSVRTGEVVQAAAAKNTVPVTLELGGKSPQIVFADADLDRALPFLVNAGIQNAGQTCSASSRILVERSIYEEVIARMSERYRALKVGPASADLSVGPVVSQRQKAIVDGYLDLAKESGLAIAAQGVLAEGAPEGGAYVLPTLIRDVPADHRLAQEEIFGPVQVILPFDTEEEAIAIANGTHYGLVCGIWTNDGGRQFRLAHAIHSGQVFINNYGAGGGIELPFGGVKKSGHGREKGFEALYGFASLKTISVYHG

SEQ ID NO: 11847 - protein, 138 aa, Glycine max
  misc_feature (122)..(122): Xaa can be any naturally occurring amino acid
ALSMISSPADTTINRAGAGLDAPFTGLKYMAGFPTRKTNNDLTSIASNGGRVQCMHVWPPVGKKKYETLSYLPDLDDAHIGKRQSNTLLRNGWIPCLEYALDHGFMYREHNMSPGYYDGRYXTMRKLPMLDCTVASKE

SEQ ID NO: 11848 - protein, 494 aa, Corynebacterium diphtheriae NCTC 13129
MTHTTQTLDDRIHELLQRIPTELFIAGQFQPAHNGATLSVTNPSDGSELATVASASEKEARAALDAAEKAQPTWAATPARERSEILRRAYDLVIEHKDDLAMIQSLELGRALPDSEAEVTYAAEFFRWFAEEAVRIRGDYRHNPTGNARIITHQQPVGPCLAITPWNFPLAMGARKLAPALAAGCTMILKPASKTPLTMLYLAQLLAEAGVPHGVVSVLPTANASVVSDLLHDARIRKLTFTGSTAVGQKLAAMAAEHSAAVSLELGGNAPYIVLDDADIDTAAQAVAVAKMRGAGQVCIAANRFLVHSSIAEEFTQRVVNIMRGFTQGPATAPGVDFGALSGDDQVSTVTTLVDDALSRGATKLLGDLPKGLPEHGSYYPATVLVDVPEDADIHCEEIFGPVVVISTFDDDDEAVARANDTKFGLAAYVFGSDLQRVLNVAERVDAGMIAVNKGALSDPAAPFGGVKESGLGREGGFEGIGEFLETKLISLPL

SEQ ID NO: 11849 - protein, 352 aa, Bacillus sp. KSM-K16
MKALVLEANQSFTIKDIETPVPKEDEALIKVAYCGICGSDLARYFDGKVHNYPIVLGHEFSGTVEAVGASVDSVAVGDRVVVAPLLPNKDDPFMQKGSPALSSSYSFLGSRENGAMAEYVVVKAENLLVLPETVTLAEAALIEPLTVAIHGIERIVLPAGEHVCVLGAGTIGIMTILALKARGAGKVTAIDINDEKLAFAKKIGADDTINSLKEDPVSYASKHGKPGAVIETAGVPSSQEQAVALVEKKGKIVFVGTASGDVTFPAATFEKILREELEITGSWMSYSGPFPGYEWQAAIDYIASGKIDVKPLIHDVFKLEDGDKPFQAMKDPDNHSIKLLYQIAENEGQVGK

SEQ ID NO: 11850 - protein, 143 aa, Zea mays
MAMAYKMATEGMNVKEECQRWFMEMKWKKVHRFVVYKIDERSRAVLVDKVGGPGEGYNELVAALPGDDCRYAVFDFDFVTVDNCQKSKIFFIAWSPAASRIRAKILYATSKQGLRRLLDGVHYEVQATDPSEMGFDVIRGRAQ

SEQ ID NO: 11851 - protein, 201 aa, Neisseria meningitidis Z2491
MMTLYSGITCPFSHRCRFVLYEKGMDFEIKDVDIYNKPEDLAVMNPYNQVPVLVERDLVLHESNIINEYIDERFPHPQLMPGDPVMRGRGRLVLYRMEKELFNHVQVLENPAATNKEQAKAREAIGNGLTMLAPSFSKSKYILGEDFSMIDVALAPLLWRLGHYDVKLGKSAAPLLKYAERIFQREAFIEALTPAEKAMRK

SEQ ID NO: 11852 - protein, 213 aa, Glycine max
  misc_feature (107)..(107): Xaa can be any naturally occurring amino acid
QLRRPPPPHANLGDSNYSFGEAEALSDEMEEESQYVAEILRIKDVLLNPEDEATEIGKAVNPLRKHGSKDIRQLARTLINGWKEMVDEWVKATTTTAITGSEEGTPXSVNPSVVDDDEEEGLPSPPLDEGAFFVTQAGSMELSQFFDGMDDDGNPRPTGPFSKNHENGRKPAFDSHVLEMRKLQPSHDTVINRDVKSQQAKGKQGCCHACEAK

SEQ ID NO: 11853 - protein, 1208 aa, Magnaporthe grisea 70-15
MEVRPQARVPPRPVLEEASMRTNYSISQNSATPPNYQHGGLKTENIRPAQPQKTRRDIPVSSSHVPLNPRLYEIREEAQSTPQSKRESQASTASYKSSSSNTFRKPKTHVGPWQLGKTLGKGSSARVRLARHTSTHQYVAVKIVAKSTCKMTQAGSLAKLDEIDSAAPEKVEGMRRMPIALEREVAILKLIEHPNIVKLYDIWENSNEIYLILEYVERGDLFDFISKHGPMPEEEAIFVFRQIMSALEYCHSYGICHRDLKPENILLKSNGQVKIADFGMAALHQGPRTPLWTFCGSPHYAAPELLREKAYRGEKSDIWSMGVILFAMMAARLPFDDEDMNLMFAKARKAIYHMPSFFSDEAKDLIHRLLQVDPRKRLSMRQMWQHPVVWKYGYLDELGGEGIPEVPNPRTRQEIKPLDLCDIDPQILRPIQSMWHTLSEDELVKKLISDDYRERQLENYDPSLTHSPSDYHHIRPPLWLTKVSTRQFMTNKANGQGRSISKFTVISNVTETGTGANLGTVRSYDPYKSPAVKQPQATHARIVIHRDSTDTDRNAASLGSTSHRRPRANSTGSWKRPARRSQLGSRILTPRSTASSVQSSRKFHARSRTSSRQKRAMDFSTARRKAAAAKLSNQQTLLGTDGSKTVTGWNIQCSSDPDIPGDTADSSNARLRSKDRLHEELRHFSSSIAKDCDEAFNSSLLSVSQFDGDRSRQGSPFSLSLGTPVSATPVTPVVTPTIPRPSARPWDSRPLPPTPPSSSHEKESAVNFGENPSILARRGQPPTQGYNLRSGPVAMTPTPSDRRVVSAPVHGGQYGGCATGKLPSIEEATPNTIQDEVNRSRIVSLPAKPVATAPTSNEARGLEFLSNAEQTIRIVHSPSAQRESGITRRPHPIQANAKPSKMVGTSTGPVKQASIDLYHADDSIISHRNAQLAQTSSHGSASTFAMRKKTSSWFKRLSRESKGSKGSLCDELDDTKSIDVPHGLTSGPIKNERDNSSINMSHRPPEKTSNKKKSFFLPFWRHKSEPRMSLAEPDFEESPSPETNAAVKSHKTSGNNLLNFGDAESAERMIKPQQNWLARLFRVKPVTRVICLSISRRRARQEVAILLRDWRKYGIRDVEVDKKRNVVFARLSSKNHLNIKEVALACEIITVIEHGKRNHLSIVRFTQEKGAASSFQRVVDTMRDVLGNRNLLVTDKSKAKMMIKTLNS

SEQ ID NO: 11854 - protein, 222 aa, Zea mays
  misc_feature (133)..(133): Xaa can be any naturally occurring amino acid
MAGLSLEHPWAFAFGLLGNVISFMTFLAPIPTFYRIYKSKSTEGFQSVPYVVALFSAMLWIFYALIKSNETFLITINAAGCVIETIYIVMYFVYAPKKAKLFTAKIMALVNGGVFGVILLLTLLLFKGSKRRXLLGWICVGFSVSVFVAPLSIMRRVIQTRSVEYMPFSLSLSLTLSAVVWFLYGLLIQDKYPTLPNDLDIIFQVIQMELYVPYMNKKQAAG

SEQ ID NO: 11855 - protein, 251 aa, Zea mays
MRKKLGTRFPAARIKKIMQADEDVGKIALAVPVLVSRALELFLQDLIDRTYEITLQSGAKTLNSFHLKQCVKRYSSFDFLTEVVSKVPDLGGADSCGDERVLPRRRKSNGSDPENDESRSSKMAIRNANTSPRGRGRGRGRGRGRPPTKRKEVGYVQFEDESSMFAEQGETLPGEGTVPEINSGNEITPQSTQPPLTAPAQATNSKVEEASTDHQSDWPMPDATGNIGVGPSGFGHLTVQVDEDEDYDNED

SEQ ID NO: 11856 - protein, 443 aa, Cytophaga hutchinsonii
MGSIKISNANIVNEGQIFQADIWIEEGLIKQIGKITAIADQTIDASGKYLFPGVIDDQVHFREPGLTHKATIYTEAKAAVAGGVTSYMEMPNTKPAAVTQELLEQKYEIAAKTSLANYSFFMGTTNSNINELLKTNPATVCGIKIFMGSSTGDMLVDNSAMLDEIFSQVKMLIAIHAEEDPIVKANTEKYKALYGDKLNATHHHLIRSEEACYASSSKAVALAKKHGTRLHILHISTAKELDLFTNTIPLEEKKITAEACIHHLWFSNEDYATKGNYIKWNPAVKTVADREAIWQAVLDNRIDVIATDHAPHTIEEKELPYIDAPSGGPLVQHSLVAMLEKYHQGKISLERIAEKMSHNVAKLFQIEKRGFIREGYYADFALVDLNKPWMVEKKNIISKCGWSPFEGYIFKSTVTDTFVSGNWVFHEGTFNEEVKGSRLTFQR

SEQ ID NO: 11857 - protein, 267 aa, Novosphingobium aromaticivorans DSM 12444
MGFDRGRRGRGRDKRDGFGDEGGFDPYGGGGFGGGGYDRGGFGGGDRGGFGGGGRGGFGGGDRGGFGGGDRGGFGGGDRGGFGGGGGGRGGFGGPRGGGGGGGMPAQVVGTGKGVVKFFNGQKGFGFIQREDGGEDVFVHISAVERAGLEGLAEGQQLEFNLVDRGGKISAADLQVVGDVIPVAAKPASPQRELTGEKASGTVKFFNAMKGFGFITRDDGQPDAFVHISAVERSGLRELNEGDKLEFDLEVDRRGKYSAVNLVPRQD

SEQ ID NO: 11858 - protein, 175 aa, Triticum aestivum
MAPTVMASSATSVVPFQGLKSTVGLPVSRRSNGASLGSVSNGGRIRCMHVWPIEGIKKFETLSYLPPISTEALLKQVDYLIRSKWVPCLEYSKVGFIFREHNASPGYYDGRYWTMWKLPMFGCTDATQVINEVEEVNKEYPDAYVRIIGFDNMRQVQCVSFIAFKPPGCEESGKA

SEQ ID NO: 11859 - protein, 146 aa, Rickettsia rickettsii
ANEAVINMLKEIGSSEYIPKYIAKAKDKNDPFRLMGFGHRVYKNYDPRAVVLKETCKEVLRELGQLDNNPLLQIAIELEAIALKDEYFIERKLYPNVDFYSGIIYKAMGIPSQMFTVLFAIARTVGWMAQWKEMHEDPEQKISRPR

SEQ ID NO: 11860 - protein, 122 aa, Anthoceros formosae
MIQPQTYLNVADNSGARKLMCIRILGASNRKYGNIGDIIIAVTKEAVPNMPLKKSEVVRAVIVRTCKEVRRDNGMTIRFDDNVAATTNQEGNPKGTRVFGPVARESRGYNFTKIIPLAPEVL

SEQ ID NO: 11861 - protein, 236 aa, Oryza sativa (indica cultivar-group)
MAGADVDVGTELRLGLPGGGGGAAEAAAKAAKRGFEETIDLKLKLPTAGMEEAAAGKAEAPAAEKAKRPAEAAAADAEKPPAPKAQAVGWPPVRSFRRNIMTVQSVKSKKEEEADKQQQQPAANASGSNSSAFVKVSMDGAPYLRKVDLKMYNSYKDLSLALQKMFGTFTATGNNMNEVNGSDAGTTYEDKDGDWMLVGDVPWQMFVESCKRLRIMKGSEAIGLAPRAKDKYKNKS

SEQ ID NO: 11862 - protein, 123 aa, Pinus taeda
MAVKKMVEAVFVVGLVVTMMNVWGAVPVEGAISCNQVVSAMTPCATYLIGNAATPAATCCPSIRGLDSQVKATPDRQAVCNCLKTQAKSYGVKLGKAANLPGLCKVTDLNVPISPNVDCSKVH

SEQ ID NO: 11863 - protein, 449 aa, Methanococcoides burtonii DSM 6242
MNPATGEVNEEIELYSEERINRTITKARTTFLEWKNLDISERAHYLKTAATQLRKDKDELGRIITIEMGKPIKESVPEVEKCAWALEYYAENAENFLAPEAVETDALESGVSFEPKGVILSIMPWNFPFWQALRFAAPALVGGNTVILKHASSVPMCALAIEKVFADAGLPEGAFQTLIIDGRTASELIARDEIAAVTFTGSLTAGRKVAEAAGRNMKKAVLELGGSDPFIVLDDANVEMAAKAGVNSRFQNGGQSCIAAKRFIVTEAVADEFLRIFIGSARKLQVGDPMDPQTDVGPLVNAQQVDIIDAQVKDSVDKGAELLLEGGRLDRLGSFYAPVILSNVNENMRVLKEETFGPVAPVIIVKDEEEAIRVAGNSDFGLGASLWTEDREHAMEIEKHIESGILSVNSMVASDPRLPFGGVKKSGIGRELYKYGLYEFMNIKSIKVY

SEQ ID NO: 11864 - protein, 529 aa, Triticum aestivum
MAAAVKTSGGFCNTQQQWLHSTRDLFLHGSTRSNAKECKSRKTKKPTSLRVEATSTKVELDFNDPSWKQKFQEDWDNRFNLPRITDIYDLKPRPTTFSLMKQRTPTGDEDSTPMDMWKGYVNNDDRALMKVIKYSSPTSAGAECIDPDCSWVEQWVHRAGPRKDIYYEPNEVKAAIVTCGGLCPGLNDVIRQVVFTLETYGVKNIVGIPFGFRGFFEKGLKEMPLSRNLVENINLAGGSFLGVSRGGAKTSEIVDSIQARRIDMLFVLGGNGTHAGANAIHDECRKRKLKVSVVAVPKTIDNDIPLMDKTFGFDTAVEEAQRAINSAYIEARSAYHGIGLVKLMGRSSGFIAMHASLSSGQVDVCLIPEVSFALDGEYGVLQHLEQLIKNKGFCVVCVAEAAGQELLQNSGATDASGNAILSDIGVHMQQKIKTHFKGIGVHADIKYIDPTYMVRACRANASDAILCTVLGQNAVHGAFAGFSGITSCICNTHYVYLPVTQVITAPKRVNNKGRMWHRCLTSTGQPDFR

SEQ ID NO: 11865 - protein, 177 aa, Triticum aestivum
  misc_feature (99)..(99): Xaa can be any naturally occurring amino acid
  misc_feature (112)..(112): Xaa can be any naturally occurring amino acid
  misc_feature (130)..(130): Xaa can be any naturally occurring amino acid
  misc_feature (134)..(134): Xaa can be any naturally occurring amino acid
  misc_feature (149)..(150): Xaa can be any naturally occurring amino acid
MAPTVMASSATSVAPFQGLKSTAGLPVSRRSNGASLGSVSNGGRIRCMQVWPIEGIKKFETLSYLPPLSTEALLKQVDYLIRSKWVPCLEFSKVGFIFXREHNASPGYYDGXRYWDNVELPMFGCTDATXVINXVEESRRIPDPYVRIXXSTTCSRECVNLTLQATGARSGKAKSHH

SEQ ID NO: 11866 - protein, 427 aa, Triticum aestivum
  misc_feature (235)..(235): Xaa can be any naturally occurring amino acid
  misc_feature (320)..(320): Xaa can be any naturally occurring amino acid
  misc_feature (362)..(362): Xaa can be any naturally occurring amino acid
  misc_feature (368)..(368): Xaa can be any naturally occurring amino acid
  misc_feature (377)..(377): Xaa can be any naturally occurring amino acid
  misc_feature (385)..(385): Xaa can be any naturally occurring amino acid
  misc_feature (409)..(409): Xaa can be any naturally occurring amino acid
TRLRAAARSTSDVKPEEFAMLVRDVPVPPPNQTIKDSVDSYFRALHPDTFYKAMVVTDITKADQIFQEIEGHRHKIAHAEAVYAESKTSNRPEGTRPTHRTGFLGLIGKKVDTLEYCNEKIKELLPKLEDEQKSTLSEKQQRAAFVFFNSRAAAASASQTLHAQMFDEWTVTEAPEPRAVIWTNLPRKIYDRQTRQTVVYLIVFVTVVFYMIPITAISAVTTLEQLRKKLPFLKXVVDQPLLKTVLQAYLPQIALIVFLALLPTLLVFLSKSEGIPSQSHVVRASSGKYFYFIVFNVFIGYAIGSSLFSALQKVIENPTXIVTTLGSRLPGNATFFLTFVALKFFVGYGLELSRLVPLINFXLKRNYXCKTEDEVKXGWAPRELXYTTRVPNDLLIVTLVMCYSVIGPXLILHLGVAYLALGWLITK

SEQ ID NO: 11867 - protein, 215 aa, Bdellovibrio bacteriovorus HD100
MKFFIDTAEIEEIRQANLRGWVDGVTTNPSLIAKSGKDFHTVIKEICKEITGPVSAEVISLQHEEMVREGKELAKLASNVVVKIPMCEDGMIAVKKLKSEGIKTNVTLVFSPMQALLAAKAGATMVSPFVGRLDDIGVEGMQMVDQVIQMYRNYDFETEVLVASVRSPMHIQLAAEMGADIATIPFKVMQSMTHHPLTDKGIKMFMDDWNKAQKK

SEQ ID NO: 11868 - protein, 648 aa, Glycine max
  misc_feature (214)..(214): Xaa can be any naturally occurring amino acid
  misc_feature (329)..(329): Xaa can be any naturally occurring amino acid
  misc_feature (354)..(354): Xaa can be any naturally occurring amino acid
  misc_feature (372)..(372): Xaa can be any naturally occurring amino acid
  misc_feature (386)..(386): Xaa can be any naturally occurring amino acid
MSSAEKPSSKGQAWFCTTGLPSDIVVEVDDMTFHLHKFPLMSKSRKLHLLITQQEAASNSTVPQQQQQQQETEDEDEIVEEQCHVTFTGFPGGSEAFEMAAKFCYGVKIDLTPSNVAALRCAGEFLEMTEDYSEDNLVSKTEGFLSQHVLKNLKDSVKTLKSCDSLMPMAENLGAAQRCVDSVVSRASSADPALFGWPVSDATSVSKQVLWGGXTATADPALAPGPVSLGFEDLALLRLPLFKRLILAMRSAGLSPEIIETCLMYYAKKYIPGVSRSNRKPLPSSSSSSSSVATEAEQKELLETVVSNLLPSSSSSSSAATEALFEEIXRLVSNLPLACSYALEKKIGLHLEKXSLDDLLMPSYSYLNETLXDVDCAARSISHFLXLLKQKTSRNGGKRRARRSPGLMLVGKLIDGYLSEIASDANLKPEKFYNFAISVPDEARLFHDGLYRAVDVYLKAHPWVLEEEREKICGLLDCQKLTLEACTHAAQNERLPLRAVVQVLFFEQLQLRQAIAGTLMAAEAAAEPGRQSAALEREAEDGRGEGLGLEHVQERNGTWRVAVRENQVLRLDMDSMRTRVHQLERECSSMKRVISKFDKFAASGGGWRASLGRKFGCKFKTQVCDSHESTAVDTRKGRHHQQHHPHHD

SEQ ID NO: 11869 - protein, 118 aa, Glycine max
  misc_feature (19)..(19): Xaa can be any naturally occurring amino acid
  misc_feature (40)..(40): Xaa can be any naturally occurring amino acid
MATLDSDVPMVPAGEPSSXSAGPSSKKPKRFEIKKWNAVXALWAWDIVVDNCAICRNHIMDLCIECQANQASATSEECTVAWGVCNHAFHFHCISRWLKTRQVCPLDNSEWEFQKYGH

SEQ ID NO: 11870 - protein, 258 aa, Triticum aestivum
MAMEARMKGTVKWFNDTKGFGFISPDDGSEDLFVHQSSIKADGFRSLAEGEVVEFAVSEGDDGRTKAVDVTGPDGSFVQGGAGGGGGGGGFGSRGGGGSRGGGGFGGRGGDGSGGYGGGYGGGGGGGWGGQRRSGGGGAGGACFKCGEPGHMARDCSVNGPAGGGGGGGCYKCGEQGHIARDCFNGGAGGGGGGYGGGGGGNCYNCGEPGHIARDCPTSSGFGGGGGGGRFGGGGGGGNDRSCYNCGEPGHISRDCTK

SEQ ID NO: 11871 - protein, 111 aa, Arabidopsis thaliana
MIRCGQKTIIFLINNGGYTIEVEIHDGPYNVIKNWNYTAFVEAIHNGEGKCWTAKVRCEEELVKAINTATNEEKESFCFIEVIVHKDDTSKELLEWGSRVSAANSRPPNPQ

SEQ ID NO: 11872 - protein, 476 aa, Brucella suis 1330
MYPNLTLIVGGEERNKGSAGTLCLTDPADGRELTIAPRAGRAEALQAAAAEKGFAEWSALSALERSKIMRRAADIMRERADAAARIMSMEQGKPLAEARGEWLGSADLLDWFAEEGRRVYGRIVPSRAPNIQIQVLKHPIGPVAAFTPWNFPAWNTMQKVAPALGAGCSVVIKPASDTPGTAWLIGKCLLEAGLPPKAVSVIWGTTSELSDALIKAPEFRKVSLTGSTRVGRIVAAQAGEYLKKVTMELGGHGPVIVAADADLDHLIPLAVQWKFRNCGQVCVSPTRFIVEASIHDEFIRRFSEKARELKVGKGVEEGTQMGPLTSQNQLETVLSMVEDALTKGAKIETGGNRIGDTGNFYEPTILSGMTAEMLAMNEEPFGPLALVMRVHSLDEAIAESNRLPVGLGAYLFTSSMTTAHRVQNHLQAGMLGVNHFALALPETPFGGVRDSGFGSEGGLEGIEAYLTTMTVTTMMV

SEQ ID NO: 11873 - protein, 1083 aa, Streptomyces coelicolor A3(2)
MSSDRDGIRGGWATPGDDQPDAESSVETTGEFTIDYAPPAWYTQNASGDGGQGESEGADPPGGSAGSPPASAPTAPPAPRGPVPPLPGLTPPPHATHHGPSYVPAPAPGAPFTPPPPAPAPGAAFTPPPPPGPGAPFTPPAPPSGGPAGVPKLPVGSGFEPQPSPSQRSAPPEPEPEPEVRTPEPEPKAVAEPAPAADLASPAALPSFPAGGFQLQAPVPPPPAEEPGAAAEPEPEPDREPDTGDLDNGDLESGATMRFSAVALKREIAERAAAEDTAGEGPAAGADEARDTPDEPFVSTGFTDADTDAETDVDTESDFESVSDQAPDAESGGGHGDVADPRLGGSAPDAEPEPEPESEPVVLAAVAESESESAERVGDEPEDSVPTADVPVDAVPDDAAPPADSVPQDAVPQDATPPAPEGMPPLPPSYPPVAPAAAHQWPAQPQPPTQPQTAPAPPEQPGVAAQQPPFQPQAPQPAPAGWDAPPAPQPGYGFPQPGAQAPQPQPHSPAQPPGGYGFPQAPQAPHGPSPQQQPYPGVPQQQAPQAQGGGQAPPAQPGQPAQPGQPMQPGQPGQSGQPGQAPSAPQAAPHPPQAPPAQQPEYQPQAQQPQPQPQPQPYQQPADPRLGAAWPQPMQHDQRQATNPGAAPLGYTAAVELSSDRLVNNKRQKAKSSRPAAGGSRFKLGGKKEEAERQRKLDLIRTPVLSCYRIAVISLKGGVGKTTTTTALGSTLATERQDKILAIDANPDAGTLGRRVRRETGATIRDLVQAIPYLNSYMDIRRFTSQASSGLEIIANDVDPAVSTTFNDEDYRRAIDVLGQQYPIILTDSGTGLLYSAMRGVLDLADQLIIISTPSVDGASSASTTLDWLSAHGYADLVSRSITVISGVRETGKMIKVDDIVGHFQTRCRGVVVVPFDEHLSAGAEVDLDMMRPKVREAYFNLAAMVAEDFVRHQQSHGLWTSDGNPPPVAAPPMPGQQTPGQQMPGQPMPGQPMPGQQMPPQQGQPMPPQPGQPVPGQPYPPQPAPGQQQPYPQPGYNQPYAQPGYGYPQPGQPGHPGQPQQQPQQQQQPQQGQTPPPPPPQQ

SEQ ID NO: 11874 - protein, 488 aa, Burkholderia cepacia R18194
MQTQLFIDGRFVDAVDRGTIDVLNPHDGSVITKIAAATAADVDLAVEAATRAFPKWSALPAAERGRLLLRLADAIEANAEELAQLESLDTGHPIRDSRALDVPRTAACFRYFGGMADKLQGSVIPVETGFLNYVQRAPIGVVGQIVPWNFPLMFTSWKMGPALAAGNTVVLKPSEITPLSTLRIVELMAEVGFPAGVVNIVPGYGHTAGQRLAEHPGVGKIAFTGSTATGRRIVEASQGNLKRVQLELGGKGANIVFDDADLDAAINGAAWAIFHNQGQACIAGSRLVLHERIADAFLERFVALASSIRIGNPLDANTEMGPLTSKQHLDRVLSFVDVAREQGGRVLTGGSAPQDPALANGYYVRPTVIEAKSAADRVAQEEVFGPFVTVLRFGSDDEALAIANATEYGLGSGLWTKDLSRAHKMASQINAGMCWINCYKRVNPGSPFGGVGQSGYGREMGFEAMHDYTEARSVWVNVDGNVPPHFKR

SEQ ID NO: 11875 - protein, 501 aa, Zea mays
  misc_feature (366)..(366): Xaa can be any naturally occurring amino acid
  misc_feature (393)..(393): Xaa can be any naturally occurring amino acid
  misc_feature (400)..(400): Xaa can be any naturally occurring amino acid
PTSTAAGGAGAPPQGVARPPGPRPLPLIGNLLDLRRAPGSLHHTLARLARAHGAPVMRLDLGLVPAVVVSSRDAAREAFAAHDRRIAARPVPDSKRALGFCDRSMLSLPSSAPLWRTLRGVMAAHVLSPRSLAASRAARERKVADLIGYLRARAGTVVDLKEAVYGGVANLVSTAMFSIDVVDVGAAESSSSSSSAAHGLQELLEELMQCMAQPNVSDLFPFLSALDLQGCRRRVAVQLGQVLQVLDDITDRRLASSSSSSTSSKGGDRRGDFLDILLDLQSTGKITRDNVTLTLFDIFAAGSDTMALTVVWAMAELLRNPGVMARLRAEVRDALGGRDAVEEARRGGPCRSWQAVVREAMRLHPXAPVLLPHKAVEDGVQIGGYAVPRGCTXVIFNSWXAIMRDPAAWERPDEFLPERFLARDLDFRGKQLEFVPFGSGRRLCPGVPMAERVVPLVLASLVHAFQWQLPAGMSADQVDVSDKFTTTSVLAFPPIKAVPLL

SEQ ID NO: 11876 - protein, 201 aa, Escherichia coli CFT073
MALHDENVVWHSHPVTPQQREQHHGHRGVVLWFTGLSGSGKSTVAGALEEALHKLGVSTYLLDGDNVRHGLCSDLGFSDADRKENIRRVGEVANLMVEAGLVVLTAFISPHRAERQMVRERVGEGRFIEVFVDTPLAICEARDPKGLYKKARAGELRNFTGIDSVYEAPESAEIHLNGEQLVTNLVQQLLDLLRQNDIIRS

SEQ ID NO: 11877 - protein, 238 aa, Lycopersicon esculentum
MADPDTTRTVVGIIGNVISFFLFLSPGPTFVQILKAKSVMEFKPDPYIATVLNCAVWVFYGMPFVHPDSLLVITINGFGLAIELLYVSIFFIYSDWSKRQKIIIALVIEAIFMAILIFVTLTFLHGTKDRSMLIGIVAIVFNIIMYTSPLTVMKKVITTKSVKYMPFYLSLANFANGIVWACYALLKFDPYILIPNGLGSLSGLVQLILFAAFYRTTNWDEDEKEVELSTSKSNKSDV

SEQ ID NO: 11878 - protein, 102 aa, Glycine max
  misc_feature (22)..(22): Xaa can be any naturally occurring amino acid
  misc_feature (90)..(90): Xaa can be any naturally occurring amino acid
  misc_feature (93)..(93): Xaa can be any naturally occurring amino acid
YIRVCLILAVLGCSDSFLSQQXVSVLELISQLVHRRSDWRALHQYADNHLAYQRLAIDDPAYGDQLLYNEDNTCVATVHGEIHTYEELRXTVXNHTFRTGSD

SEQ ID NO: 11879 - protein, 500 aa, Zea mays
MSSSPSFGLLAVAALLLALSLAQHGSLAATVGPRVIVVGAGMSGISAAKRLSEAGITDLLILEATDHIGGRMHKTNFAGINVELGANWVEGVNGGKMNPIWPIVNSTLKLRNFRSDFDYLAQNVYKEDGGVYDEDYVQKRIELADSVEEMGEKLSATLHASGRDDMSILAMQRLNEHQPNGPATPVDMVVDYYKFDYEFAEPPRVTSLQNTVPLATFSDFGDDVYFVADQRGYEAVVYYLAGQYLKTDDKSGKIVDPRLQLNKVVREIKYSPGGVTVKTEDNSVYSADYVMVSASLGVLQSDLIQFKPKLPTWKVRAIYQFDMAVYTKIFLKFPRKFWPEGKGREFFLYASSRRGYYGVWQEFEKQYPDANVLLVTVTDEESRRIEQQSDEQTKAEIMQVLRKMFPGKDVPDATDILVPRWWSDRFYKGTFSNWPVGVNRYEYDQLRAPVGRVYFTGEHTSEHYNGYVHGAYLSGIDSAEILINCAQKKMCKYHVQGKYD

SEQ ID NO: 11880 - protein, 449 aa, Oceanobacillus iheyensis HTE831
MEDLFELDKKHFIHPTSSIIQQQTDGAKSIMAKGDGIYVTDTNNKEYIDAVSSLWNVNIGHGRTELAEVASEQMKKLAFSSAFSTFSHEPAIRLAKKISELTPQGLNAVFFTSGGSESNDSAVKLSRHYWKIQNKASKRKIISLKRGYHGVAAASTSITGIPEFWDMAGHLMNDFLHAETPYRSTTEKAIESLQSMIEQETADTIAAIFVEPVQGAGGVLIPPADYLEAVREICDFYNILFIADEVITGFGRTGTMFGMENWNVVPDAMTFAKGVTSGYIPMGGVVVSDHIHTVLKEKSKGTLFHGFTYSGHPTAAAVALKNIEIIEKESLVTNAKERGLELQNGFQKIKKESSIVGEVRAIGLIGAIELMQDSATGQPFTPDVGVTPAVINALHERGVISRGVTYDGSNILCFAPPLIITKQEVNELISRISDAILFVQHQLGVSQNY

SEQ ID NO: 11881 - protein, 312 aa, Mesorhizobium loti MAFF303099
MTDYTKLIDAETWAFIERTNSYYPPDTIDYTITQQREIYDRMCREFFAGYPQGVTVETSAIATPTHDIPIRIYRSAPQPAATVLCIHGGGFMLGGLDSHDDVCAELCARTGYEVVSVDYRLAPEHLHPAAFDDAMTAFAWVASTRDRPILLCGDSAGGNLCAAVSHATRGHVKRPVGQVLIYPGLGGDRSKDSYVTHAEAPMLTMRDLEFYKHIRTGGQDRSGDATLAPLADTDFANLPPTVLVTAQCDPLSSDGETYRDRIIAAGGRATWFEEPGLVHGYLRARHTVGRARESFTRIVGAAAALGQGAWLW

SEQ ID NO: 11882 - protein, 503 aa, Ralstonia metallidurans CH34
MRDRTLVLSVLIVASCGLGYELIAGALSSYLLGDSILQFSSIIGCYLFAMGVGSWLSRYVKDEDVLTRFIDIEILVGLLGGISAALLFVVFAWLSAPFRTALYALVFVIGMLVGMEIPLVMRILNARRAQFSDLVSRVLTFDYLGALAVSLVFPLVLAPRLGLSRTGFLFGMLNVAVALFTLRIFRDEVSRTTLRTLRAGMVLAVLTVGFAGSNYLTHWAERGLFGDEIIHSETTPYQRLVITRWKDDLRLYINGNLQFSSRDEHRYHEALVHPVLQALPWARRVLVIGGGDGLALREILKYRNIEHVTLVDLDPAMTTLFSRSEPLRALNHGSLTDQRVTVVNADAAQWLEQNQDSFDAIIVDLPDPSNFGLGKLYSVPMYRLMSRHLAEKGYAVVQSTSPYYAPRSFWDIDATLREAGLHTWPYHTYVPSFGEWGYILVGKRNDYTPPTRYDVPMKFLDGDTTALMFRFPADMAPRQGEPNRLNEQTLVHDFERDWRNVIR

SEQ ID NO: 11883 - protein, 484 aa, Oceanobacillus iheyensis HTE831
MAELKAITTYQMYINGEFVNASNNETLEVTNPATEEIVSTVPKASLEDTRRAIDGSAKAQKDWANLPSSKRASYLFAISKEIRSNIDEYAKIISEEMGKPLDQAVVEVSVTADYFEYIAGWARKYEGEIVPSDREKENILVFKQPIGVVAGILPWNFPFFLIARKAAPAILTGNTIVLKPSSVSPNNALAFAKILDKVGLPKGVINIVTGAGSIVGEELSKNEKIGMISLTGSTEAGSRVMEKASKNITKVSLELGGKAPSIVMEDADIDLAVKSVLDSRIINTGQVCNCTERVYVHEDVADEFIEKITKAMSNVSYGNPLGNEQIDMGPLSNEAGLKNVEDMVKRAVENGATVLTGGNRVNTEAGYYYEPTVLSNVDNSFEIMKEEVFGPVLPIATFTSLDEAIELANDCQYGLTSAIFTNNVNYMMRASNELEFGETYVNRESFEAIQGFHAGWKKSGIGGADGKHGLGEFLQTHVVYIQYK

SEQ ID NO: 11884 - protein, 1233 aa, Neurospora crassa
MDNRTGSRVSVRQPLGDATNRANIAAMQTSSRPKLEANAKSWKNTNRSKSNPPIITDIPLVQHHIVTIPSPVAVPDVPSMSRLRHPSSLQQMNTQASDARRVSQFSNVSSNASITRLQKTHIGPWQLGKTLGKGASARVRLARHRTTHQLVAIKIVAKSTAHVTQATSMANLDRVDYRKPSISTDGVRRMPLAIEREVAILKLIQHPNIIKLHDIWENRQDIYLVTEYVEKGDLFDFINWNGSLNEEEAIFYYRQIMSALEYCHSFNICHRDLKPENILLKADGQIKIADFGMAALHQEPTHHLKTACGSPHYAAPELLKHQPYKGSAVDIWAMGVILFAMLAGRLPFDDSDMDAMLQRARKGYYKMPSELSREAKDLIRKILVVNPLQRITMKQMWKHPLIKKYDYVDDYQQSDGQPQDVLRNADIGPIPEKEVDPQILRQLKAMWHAYSEAQIKEKLGQTKPNDQKVFYWLLYRHRHAQLENYNNDIPISKSDFHHLKPPNWGKRISTCEFTQSSRNGHGRSISKFTVISNVAEVNDSGTVRSYDPYRASQVLRNCASEASHARIIVHRNPSEPGTRSNTSNIAHSYNSYTSFGGSFRRRPRMSSQRTNTTGRLRSSMGSMGSLRSLNGTPRVRANNRSRRGVDFSSIRARDRLQARVRENVRAAPSSAAGSSVVDRRNSCRQQQRQKAAIIHSADNTLKSRDETLIWDEELQQLGYRIAMDCDEAFRSSLVGSETSVAVSGSRENSPFSLSLGASSPSPQPESPTALPLQQQAVNHSWVNRPLPPIPSIEISPVVNQTYGVNVVRPAPLRIERLSLGNCASASQTLVPDRRIVSEPVYTTPANRDPRQLPSINETASEDWTRNASTRWASPDTPSPAENNKALNYLARAENTIRVVNSPTAGPVPMPEPLNVRKVSKATPAASGESNYRKTALSNIPPDFKENCPPGTQQEEQGVGDNTVNAGAPAKKRVPSWFRRSSKDNTSFATTANTAAIHNDSTIISDIHQQLDGLESQSSARPDPYPNKKKAFSLAFWKGSKSENSSPTASTFDISTSKEGGGKKHKSSKSESRVVSGATSQSWGEGEGVGRQIEVQQNWLARLFRVKPATRHLCFSMPRRRARQEVAILLREWRQFGIKDVEVDKERNIIFARVGAQNVHNVKEVSFAIEIMMVIEHGKRNQRTQLSIARFTQEKGAASSFHKVVDAINVEFRNRGLLVTDKRKTQMMIKTLNS

SEQ ID NO: 11885 - protein, 427 aa, Azotobacter vinelandii
MPFTANRDFQRDPRLVVAARGNYLTDAEGRQVYDSLSGLWCCGAGHGRREIAEAVTRQLGTLDYSPGFQFGHPLSFRLAEKIASLTPAGLDHVFFTNSGSECADTALKIARAYWRLKGKAGKTRLIGRARGYHGVNLGGTAVGGIGGNRKAFGPLSDVDHLPHTLLAENAFSRGLPAHGGAALADALLGLIELHDASNIAALIVEPMSGSAGVLVPPEGYLARLREICDRHEILLIFDEVITGFGRTGALFGAERFGVTPDILNLAKQLTNGAAPMGAVLVKGEIYDTFMRQELPEHAVEFAHGYTYSAHPVACAAALATLELLERDNLLQRAAELAPHFENALHGLRGARHLLDIRNCGLAGALQLAPRDGDALVRPFEAAMRLWRRGFYVRCGGDTLQFGPPFSSSAAELDRLFDAVGEVLGGLD

SEQ ID NO: 11886 - protein, 350 aa, Bacillus cereus ATCC 10987
MKALLWHNQRDVRVEEVPEPTVKPGAVKIKVKWCGICGTDLHEYLAGPIFIPKEEHPLTHVKAPVILGHEFSGEVVEIGEGVTSHKVGDRVVVEPIYSCGKCEACKHGHYNVCEQLVFHGLGGEGGGFSEYTVVPEDMVHHIPDEMTYEQGALVEPAAVAVHAVRQSKLKEGEAVAVFGCGPIGLLVIQAAKAAGATPVIAVELSKERQELAKLAGADYVLNPATQDVLAEIRNLTNGLGVNVSFEVTGVEVVLRQAIESTSFEGQTVIVSVWEKDATITPNNLVLKEKEVVGILGYRHIFPAVIKLISSGQIQAEKLITKKITVDQVVEEGFEALVKDKTQVKILVSPK

SEQ ID NO: 11887 - protein, 484 aa, Corynebacterium glutamicum ATCC 13032
MTATFAGIDATKHLIGGQWVEGNSDRISTNINPYDDSVIAESKQASIADVDAAYEAAKKAQAEWAATPAAERSAIIYRAAELLEEHREEIVEWLIKESGSTRSKANLEITLAGNITKESASFPGRVHGRISPSNTPGKENRVYRVAKGVVGVISPWNFPLNLSIRSVAPALAVGNAVVIKPASDTPVTGGVIPARIFEEAGVPAGVISTVAGAGSEIGDHFVTHAVPKLISFTGSTPVGRRVGELAINGGPMKTVALELGGNAPFVVLADADIDAAAQAAAVGAFLHQGQICMSINRVIVDAAVHDEFLEKFVEAVKNIPTGDPSAEGTLVGPVINDSQLSGLKEKIELAKKEGATVQVEGPIEGRLVHPHVFSDVTSDMEIAREEIFGPLISVLKADDEAHAAELANASDFGLSAAVWSKDIDRAAQFALQIDSGMVHINDLTVNDEPHVMFGGSKNSGLGRFNGDWAIEEFTTDRWIGIKRS

SEQ ID NO: 11888 - protein, 345 aa, Glycine max
SSQLRRPPPQKKKKKGLTRRKNLPLTVYNKLSIAVAFSLPLRIFFFFFSSNPKSWPRKLTTKVIELNTLKAMAQSHGSILTRSVWSSNLESEFDLIRSVIDSFPLISMDTEFPGVVVRPDAGDPSFRHRQPVAHYAVLKANVDRLHLIQIGLTLSDNAGNLPTLGTSNAFIWEFNFKDFDVARDAHAHDSVELLRRQGIDFEKNRDFGIDSFRFAELMMSSGLVCDDAVSWVTFHSAYDFGYLVKLMTHRTLPEELREFLRLVRVFFGDRVFDVKHLMRFCSNLHGGLDRVCQSLKVERVIGKSHQAGSDSLLTLHAFQNIRENYFDKADGLVQYAGVLYGLEVF

SEQ ID NO: 11889 - protein, 363 aa, Shigella flexneri
MSKNYHIAVLPGDGIGPEVMTQALKVLNAVRNRFAMRITTSHYDVGGAAIDNHGQPLPPATVEGCEQADAVLFGSVGGPKWEHLPPDQQPERGALLPLRKHFKLFSNLRPAKLYQGLEAFCPLRADIAANGFDIQCVRELTGGIYFGQPKGREGSGQYEKAFDTEVYHRFEIERIARIAFESARKRRHKVTSIDKANVLQSSILWREIVNEIATEYPDVELAHMYIDNATMQLIKDPSQFDVLLCSNLFGDILSDECAMITGSMGMLPSASLNEQGFGLYEPAGGSAPDIAGKNIANPIAQILSLALLLRYSLDADDAASAIERAINRALEEGIRTGDLARGAAAVSTDEMGDIIARYVAEGV

SEQ ID NO: 11890 - protein, 460 aa, Lycopersicon esculentum
MDSSWEASVTDSINAIYLLFSAYLVFVMQLGFAMLCAGSVRAKNAMNIMLTNVVDAVVGSLSYYLFGFAFAFGDSNPFIGASYFALKDIPSSSYDYSFFLYQWAFAIAVAGITSGSIAERTQFTAYLVFSFFLTGFVYPVVAHWLWSSNGWLSPNSTYLLFGSGAIDFAGSGVVHLVGGIAGFWGSIVEGPRVGRFDAFGNPVKMRGHNATLVVLGTLLLWFGWFGFNPGSFNKILVAYPHMADQGNWTSVGRTAVTTTLAGSTAGIVTLFGRRLLVGHWDAMDVCNGVLGGFVAITSGCSVVEPWAAILCGFCAAWVLIGLNILALKFKFDDPLEAAQLHGGCGAWGLIFTGLFAKEEFVLQAYNSGKTQIIRPSGLILGGGWGLFGAQIVELLSIVVWVSLTMGPLFYLLQKLGILRISSDEEVAGLDISSHGGYAYDASQEESNARFYGEYLRMQQQ

SEQ ID NO: 11891 - protein, 271 aa, Ulva intestinalis
MLRAIAQRARGSALQCAAPGTEWASCVRGSSGFTAYDVGESTNIKWHETMVSRGDKERLLNQRGCVLWFTGLSGSGKSTVACTLEHALNARGKMTALLDGDNVRHGLNSNLTFTAEDRTEHPPHRRSEQALCRRWRPPLRELHLRPIAPTRPVRERCAGDFVECYMKIPIELCEQRDPKGLYKKARAGLMKGFTGIDDPYEEPLEPELTITVREEGSDMNSPEAMAKQIFDYLEAKGFLKGPAVASSGGSCARVARWGGHGRRRGRQRLAW

SEQ ID NO: 11892 - protein, 126 aa, Brassica napus
  misc_feature (55)..(55): Xaa can be any naturally occurring amino acid
MERLNARLAVLSAHLEVSDPMPAATEPWCKSIAGPLAGNLTIVDERTGKKYQVPXVSEEGTVKSIDLKKITSGAHDKGIKLYDPGYLNTAPVRSSVSCTDGDEGTLRYRGYLIEELGESSTFFWGA

SEQ ID NO: 11893 - protein, 287 aa, Zea mays
  misc_feature (100)..(100): Xaa can be any naturally occurring amino acid
  misc_feature (114)..(114): Xaa can be any naturally occurring amino acid
  misc_feature (161)..(161): Xaa can be any naturally occurring amino acid
  misc_feature (177)..(177): Xaa can be any naturally occurring amino acid
  misc_feature (192)..(192): Xaa can be any naturally occurring amino acid
  misc_feature (205)..(205): Xaa can be any naturally occurring amino acid
  misc_feature (221)..(221): Xaa can be any naturally occurring amino acid
  misc_feature (232)..(232): Xaa can be any naturally occurring amino acid
PFPQPRRVASYDPKLSLLRRSQPWPKNYPTVSAEYSEAVREGQAASLRALIAEKSCAPLMLRLAWHSAGTFDVSSRTGGPFGTMKHQSELAHGANAGLDXIAVRLLEPIKEEFXILSYADFYQLAGVVAVEVTGGPEIPFHPGREDKPQPPPEGRLPDATXGSDHLRQVFGKQMGLXSDQDIVALSGGHTLXGRCHKERSGFRGXPWTTNPFGSFDNSYFXELSEWVIKEGXLLQLPSDKALLSDPVFPPSCREICWADEKAFFDDYKEAHLKLSRTGVSNHWLHNV

SEQ ID NO: 11894 - protein, 527 aa, Zea mays
MAMAMMAMRRAVALGARHIPAAAASSFRVVSLRHMSADAGAAMEKIRAAGLLRTQGLIAGQWVDAYDGKTIEVQNPATGEVLANVSCMGSRETSDAIASAHSTFYSWSKFTASERSKALRKWYDLIISHKEELALLMTLEQGKPMKEALGEVNYGASFIEYFAEEAKRIYGDIIPPTLSDRRLLVLKQPVGVVGAITPWNFPLAMITRKVGPALACGCTVVVKPSEFTPLTALAAADLALQAGIPAGALNVVMGNAAEIGDALLQSTQVRKITFTGSTAVGKKLMAGSANTVKKVSLELGGNAPCIVFDDADIDVAVKGSLAAKFRNSGQTCVCANRILVQEGIYEKFAKAFIQAVQSLKVGNGLEESTSQGPLINEAAVQKVEKFINDATSKGANVMLGGKRHSLGMSFYEPTVVGNVSNDMLLFREEVFGPVAPLIPFKTEEEAVHMANDTNTGLAAYIFTKSIPRSWRVSESLEYGLVGVNEGIISTEVAPFGGVKQSGLGREGSKYGIDEYLELKYICMGNLG

SEQ ID NO: 11895 - protein, 174 aa, Glycine max
MSDAPASPSHESGGEQSPRGSLSGAAREQDRYLPIANISRIMKKALPPNGKIAKDAKDTMQECVSEFISFITSEASEKCQKEKRKTINGDDLLWAMATLGFEDYIEPLKVYLARYREAEGDTKGSARSGDGSARPDQVGLAGQNAQLVHQGSLNYIGLQVQPQHLVMPSMQGHE

SEQ ID NO: 11896 - protein, 244 aa, Zea mays
  misc_feature (78)..(78): Xaa can be any naturally occurring amino acid
  misc_feature (104)..(104): Xaa can be any naturally occurring amino acid
  misc_feature (121)..(121): Xaa can be any naturally occurring amino acid
  misc_feature (143)..(144): Xaa can be any naturally occurring amino acid
RKHCPPSSVPSRRVACSSSAADADVVDLFDAAKLTVDKFVTSGMVVGLGSGPASALAIQYLGTRLRRGSLTGITAVTXPRSVLSASEADKAGIRANSYQEGTQXGEEGTLAAVIGRRRTRXGEPSFMAEKAMAKSAHKLAFIXXNDKYVTTGVEGSIPVLIKKVWRRPSFGTAGPLGGDHPLVTKEGHHVLDVIFTTPIQDLGQVAEKLDKVDGVVDHGIICSNQPYAVIASKGEVQVLDEKSS

SEQ ID NO: 11897 - protein, 137 aa, Gossypium barbadense
MAEEHRCQAPQLCANNCGFFGSPTTQNLCSECYRGLQLKEQQSSSAKQAFNHTLVPSSSSLPSSSSARSSFSASLPAKEEPSAGTKETKVVEEEEVQVTPNRCLSCKKRVGLTGFKCRCGMVFCGIHRYPGTTCLCF

SEQ ID NO: 11898 - protein, 113 aa, Zea mays
  misc_feature (101)..(101): Xaa can be any naturally occurring amino acid
GADQAVRQPFQSRFDLLLLLAGPNTTRLASKLARGPTVIMASSETAVAPFKGLKSAAGFPVSRRRTRSLGNLRNGGGIRSMQVWPAYGTKKFKTLSYLPPXLSTDNLLKQVDY

SEQ ID NO: 11899 - protein, 441 aa, Pseudomonas putida
MALTREQQIAALEKDWAENPRWKGVTRTYTAADVVRLRGSLQPEHTLARQGAEKLWKLVTQGAHPSFRPEKDFVNCMGALTGGQAVQQVKAGIQAIYLSGWQVAADNNSAESMYPDQSLYPVDSVPTVVKRINNSFRRADQIQWKAGKNPGDKGYIDYFAPIVADAEAGFGGVLNAYELMKNMIEAGAAGVHFEDQLASVKKCGHMGGKVLVPTQEAVQKLVAARLAADVSGVPTIILARTDANAADLLTSDCDPYDQPFVIGERTREGFYKVRAGLDQAISRGLAYAPYADLIWCETAKPDLDEARRFAEAIKKEYPDQILSYNCSPSFNWKKNLDDATIAKFQRELSAMGYKHQFITLAGIHNMWHGMFNLAHDYARNDMTAYVKLQEQEFADASKGYTFVAHQQEVGTGYFDDMTTVIQGGASSVTALTGSTEEEQFH

SEQ ID NO: 11900 - protein, 114 aa, Capsicum annuum
MEMVSKIACLVVLCMVVAAPHAEALTCGQVAGDLAACLPYLQGSGPLGSCCGGVRALLGAAKTPADRKTACTCLKSAANAIKGINLSKAAGLPTACGVNIPYKISPSTDCSTVQ

SEQ ID NO: 11901 - protein, 135 aa, Brassica napus
MGEVVEIMFGNGFPEIHKDTSPIQTLHSNQQECHWYEETIDDDLKWSFALNSVLHKGTSEYQDIALLDTKRFGKVLVIDGKMQSAERDEFIYHECLIHPALLCHPNPKTVFIMGGGEGSAARQILKHKTIEKVVM

SEQ ID NO: 11902 - protein, 151 aa, Picea abies
MAMDPLLSTVQQLLGVPDDLERILHAPTRSYMRDTEATASTPVDVKEYPNSYVFIVDMPGLKSNDIKVQVEDENVLNISGERKRNEKEEGEVKYIRMERRVAKFMRKFSLPADCNLEAISAACQDGVLTVTVPKLPPPEPKKPKTIAVKIG

SEQ ID NO: 11903 - protein, 436 aa, Triticum aestivum
  misc_feature (131)..(131): Xaa can be any naturally occurring amino acid
  misc_feature (313)..(313): Xaa can be any naturally occurring amino acid
  misc_feature (364)..(364): Xaa can be any naturally occurring amino acid
  misc_feature (395)..(395): Xaa can be any naturally occurring amino acid
RRSVPPLPYPSPPPAPASPPAPSPPPVPPRRGAAASAPLLHRGLDHPPAGRLPPPRRRLLRRPRRPPRRPPAPPRALALSPRLPPRTAWWTRVVRFVGYVPVAKRSRIVDLSRGFRQRGPDGSGVHSFVDXELAHHRLPKAKLTSDHHPLYNEGKTVVVTVNGEIYNHEELKAKLKSHQFQTGSDCEVIAHLYEECGGPLYMGWGLDGSVGLPAAREACCVAARRAIGICPLYMGWGLDGSVWFSSEMKALSDDCERFISFPPGHLYSSKTGGLRRWYNPPWFSESIPSAPYDPLLIRESFEKAVITRLMTDXLMTDVPFGVLLSGGLDSSLVASVVSRYLAETKVARQWGNKLHTFCIGLKGXPDLKAAKEVADYLCTVHHEIHFTVQEGIDAXLEEVLYHIQTYDVTTIRASPPIVSNVSGKINSWGVKNGLFR

SEQ ID NO: 11904 - protein, 396 aa, Pseudomonas syringae pv. syringae B728a
MTTQMLRKRICVLPGDGIGIEVMEAALPVIAALNLPFDLVPADIGWQCWRAEGETVPARTWEIMASCDATLLGAITSKPLAEAEAELPLTLQGQNRRYVSPVIQLRQNLDLYANVRPVTDMTGENRFRFVVIRENTEGLYAGLDFGCIPDALVPLLEEREALGAAWQREGQDDATVTLRLQTRSGLMRIFEYAFEYARKNHFTRVTFVDKPMVLRHSSAFARGIFEATAQRYPDVSGVIENVDAVALWMVQRPERFGVIVAENMFGDILSDLGAGVMGGLGFAPSGNFGNSGAYFEPVHGSAPAHAGLNKANPGAMFMAIALMLEHLGFPTESACISQAVSLVSRTSTRTYDLGGSHTTAQVGEAIVQQCIELQSRTFGYRNEQASAPGERHVSAL

SEQ ID NO: 11905 - protein, 138 aa, Magnaporthe grisea 70-15
MSDNEFGANDDLSLPKATVQKIVSEILPQSDGITYSKEARDLLIECCVEFITLISSEANEISDKEAKKTIACDHITKALEVLGFSEYVPAVLEAAAEHKEVQKGREKKANKFEQSGLSLEELERIQAEEFAKAASRHH

SEQ ID NO: 11906 - protein, 303 aa, Blumeria graminis
MKNLLAESLIEAICAKTKELLMQESNVVHIQAPVTVVGDIHGQFYDLIEIFKIGGFCPDTNYLFLGDYVDRGMFSVETISLLVCLKLRYPHRVHLIRGNHESRGVTQSYGFYTECSRKYGNANVWHFFTDMFDFLTLSVVINDQIFCVHGGLSPSIHSIDQIKVIDRYREIPHEGPMADLVWSDPDPERDEFSLSPRGAGYTFGAEVVKKFLAVNNMTHILRAHQLCQEGYQVLYDDRLSTVWSAPNYCYRCGNMASVLEVSDLGERFFNVFAAAPENDFLKGDLHNGTEKVSDGNSLPDYFL

SEQ ID NO: 11907 - protein, 349 aa, Bacillus sp. KSM-K16
MRAAVWYKEKDIRVEEREPAKLGARDVKVRVAWAGICGSDLHEYLHGPVIIPKGEPDPITGGESPLTLGHEFAGVIEEVGTEVKSFQKGDRVVINPLFTYGNKPASVDLYDGFSFAGLATDGGFADFAVLPEKNVYKLPDNLTLEEGALVEPMAVAVQAVKEADFKFGQSVAVFGAGPIGLFTIIAAKAAGASKIIVFDLSEERLEKARLVGATHTFNSGAVDPVEKVKSLVPDGVDVSFEVAGVNATFNQSIQVAKSRGVVVVVSIFAKPIEFNPMDLTGSGVKITSTLAYEPEVFQTTIDLMAEGALNPKGVITDRIELENIVESGFEVLTNDKRQAKILVKLSGEK

SEQ ID NO: 11908 - protein, 463 aa, Ralstonia metallidurans CH34
MPNLTTDHIDMLRHAVRGKVLLPADAGYETARTVWNATVDRRPAIIVQCSGTADVMQAVGFARDRGLVLAVRGGGHNIAGSAICNGGLVIDLSQLRTVHVDPLERVAWVSPGATLADFDHEAQAQGLATPLGINSTTGVAGLTLGGGFGWLTRKYGMTVDNLLGCEIVTADGTRHWTDSRHEPELFWALRGGGGNFGVVTLFQFRLHPVGPMITAGLLVFPAVEAKAVLRQYRAYVESTMPEDLNVWVVLRKAPPLPFLPASAHGKDVVVLAVFHDGDPAAAEKAIEPLRKFGETVGEHVGQMPYTAWQQAFDALLGPGARNYWKSHNFTRLEDGAIDAMTDFALRLPSPLADIFVGQVGGVANRVAPDATAYHHRDARYVLNVHARWERPDEDAACIAWARDFFRATETFATGGVYVNFLTDDETARIGAAYGPNYARLAQIKRTYDPQNLFSTNQNIAPAS

SEQ ID NO: 11909 - protein, 239 aa, Brassica napus
MGEESEAFATTAPLAPVTGERKVRNDLEETLPKPYLARALVAPDTEHPNGSEGHDSKGMSVMQQHVAFFDQNGDGIVYPWETYAGFRDLGFNPISSVFWAIFINFAFSYVTLPSWLPSPLLPVYIDNIHKAKHGSDSSTYDTEGRYVPVNLENIFSKYALTAPNKITLKELWNLTEGNRMAIDPFGWLANKVEWLLVYLLAKDEEGFVSKEAVRGVFDASFFEYCAKKNKEKADSRKQD

SEQ ID NO: 11910 - protein, 370 aa, Azotobacter vinelandii
MALSGTAAGNTALCTVGRTGNDLHYRGYDILDFATTCEFEEVAHLLVHGKLPNVAELNGYKAKLKSLRGLPAGVKAALEQLPPSSHPMDVMRTGVSVLGCLSPEKEDHNYPGARDIADKLMASLGSMLLYWYHFSHNGKRIDVETDDDSIGGHFLHLLHGKKPSDSWVRAMHTSLILYAEHEFNASTFTSRVISGTGSDMFSCITGAIGALRGPKHGGANEVAFEIQKRYDTPDEAEADIRARVERKEVVIGFGHPVYTVGDPRNKVIKEVARELSVEQGNTKMYDIAERLESVMWEIKKMFPNLDWFSAVSYHMMGIPTAMFTPVFVIARTSGWAAHAIEQRIDGKIIRPSANYVGPENLKFVPLRERK

SEQ ID NO: 11911 - protein, 230 aa, Lotus corniculatus
MTVAGYLNIGDFIPPLEWLDLQGVQGKMKKLHNRFDAFFAHIIEEQKVILKSEKHQDLLSTLLSLKEAPEDGDKLNDTEIKALLLNLFTAGTDTSSSTAEWAIAELIKNPRIMGQVQQELDNVVGKDKLVTELDMPNLPYLEAVVKETFRLHPSTPLSLPRAAAKSCEVFDYHIPKGATLLVNVWAISRDPKEWASPLEFRPERFLPGGEKASVDVRGTDFALIPFGAGR

SEQ ID NO: 11912 - protein, 353 aa, Aegilops triuncialis
MKTFLVFALLAIAATSAIAQMETSRVPGLEKPWQQQPLPPQQQPPCSQQQQPFPQQQQPIIILQQSPFSQQQQPVLPQQQPVIILQQPPFSQQQQPVLPQQPPFSQQQQQQQQQQQQQPPFSQQQQPVLPQQPPFSQQQQPPFSQQQQPSSQQPPFPQQHQQFPQQQIPVVQPSVLQQLNPCKVFLQQQCSHVAMSQRLARSQMWQQSSCHVMQQQCCQQLPQIPEQSRSEAIRAIVYSIILQEQQQGFVQPQQQQPQQSGQGVSQHQQQSQQQQQLGQCSFQQPQQLQQLGQQPQQQQIPQGIFLQPHQISQLEVMTSIALRTLPTMCGVNVPLYSSTTIMPFSIGTGVGGY

SEQ ID NO: 11913 - protein, 277 aa, Glycine max
  misc_feature (262)..(262): Xaa can be any naturally occurring amino acid
HVEELLPVVYTPTVGEACQKYGSIFMHPQGLYISLKEKGKIREVLRNWPEKNIQVIVVTDGERILGLGDLGCQGMGIPVGKLSLYTALGGVRPSACLPITIDVGTNNEKLLNDELYIGLKQRRATGQEYAELMHEFMTAVKQTYGEKVLIQFEDFANHNAFDLLEKYRSTHLVFNDDIQGTASVVLAGLVAALKLVGGNLADHRFLFLGAGEAGTGIAELIALETSKQTNAPLEEVRKNIWLVDSKGLIVSSRKDSLQHFKXPWAHEHEPVRNLVDA

SEQ ID NO: 11914 - protein, 162 aa, Triticum aestivum
  misc_feature (94)..(94): Xaa can be any naturally occurring amino acid
  misc_feature (132)..(133): Xaa can be any naturally occurring amino acid
  misc_feature (137)..(137): Xaa can be any naturally occurring amino acid
  misc_feature (154)..(154): Xaa can be any naturally occurring amino acid
MAPTVMASSATSVAPFQGLKSTAGLPVSRRSNGASLGSVSNGGRIRCMQVWPIEGIKKFETLSYLPPLSTEALLKQVDYLIRSKWVPCLEFNKXWVHPPVNNNASLGYYDGRYWDNVESLPNFGCTGPTQVXXLEGXQEGLPDAYFRIIGSTTXRQVQCVSS

SEQ ID NO: 11915 - protein, 483 aa, Ustilago maydis 521
MAPVAVTESTPIAPTAAKLNGAATHNGDMNGTITNTTGPSLFGSNTSAVLHGAKDLRIEERPYAAPIGDEVQIRVRATGLCGSDLHYYLHGRNGDFALQHSMCLGHESAGEIVAVGPNVPASLGLAVGDRVAIEAGRFCGSCLKCRDGRYNLCKQMRFASSAKTHPHLDGTLQKYMNWPSWLVHKLPANVSLTSAALCEPLSVVLQGIRRSQLQPGQSVLVYGAGAVGLLACAAAKASGASFVAAVDIDQGRLAFAAANGWADATYLLPRAAPAAVDGEQTNVGARRAAEDKAAISSASASAASLLKALSSSDPSSSQQTSYAIQPAPLDLSSEGFDVVFECTGVPTCVQTGIFATKAGGKVVLIGMGNPIQTLPVGSASLREVDIVGVFRYANTYPVALGLLAGGTLRAQGGGLHAQAVGLPTNLDTNEGHGPGRKMGGIENLVSHTFPLKHAIKAFETLANGKDPEHGRGVVKVFITDDDA

SEQ ID NO: 11916 - protein, 463 aa, Methanocaldococcus jannaschii
  misc_feature (457)..(457): Xaa can be any naturally occurring amino acid
MFIDGKWINREDMDVINPYSLEVIKKIPALSREEAKEAIDTAEKYKEVMKNLPITKRYNILMNIAKQIKEKKEELAKILAIDAGKPIKQARVEVERSIGTFKLAAFYVKEHRDEVIPSDDRLIFTRREPVGIVGAITPFNFPLNLSAHKIAPAIATGNVIVHHPSSKAPLVCIELAKIIENALKKYNVPLGVYNLLTGAGEVVGDEIVVNEKVNMISFTGSSKVGELITKKAGFKKIALELGGVNPNIVLKDADLNKAVNALIKGSFIYAGQVCISVGMILVDESIADKFIEMFVNKAKVLNVGNPLDEKTDVGPLISVEHAEWVEKVVEKAIDEGGKLLLGGKRDKALFYPTILEVDRDNILCKTETFAPVIPIIRTNEEEMIDIANSTEYGLHSAIFTNDINKSLKFAENLEFGGVVINDSSLFRQDNMPFGGVKKSGLGREGVKYAMEEMSNIXTIIISK

SEQ ID NO: 11917 - protein, 493 aa, Corynebacterium glutamicum
MTVTTPTTYSAIVADQLYIGGWREGTSERIATTTNPFNDETIATIRQASPDDVDAAYEIAKESQAVWAALAPKERVHILTKAADWIEENQEAVIELIRVESGSTAIKATIETSLAVGSLREAATFPTRITGQILPSNTPGKANYVFREALGVVGVISPWNFPFALSMRSVAPALACGNAVVVKPASDTPLTGGLLLGKIFEAAGLPEGVLNIVVGSGSEIGDHFVEHPIPRLISFTGSTPVGKQVGATATGGKHIKKVALELGGNAPLVVLEDADLDQAVGAAAMGKFLHQGQICMAVNRIIVQAPLYDEFVEAFAKRVQTLAYGDQCDDATVVGPVINDSQLHSVTKKIERARIEGAREVVSGPIEGRVIAPHVFADVTPAMELFREEIFGPVVGIIKAKDEAHALELANDTEFGLSSAVYTRDLARGLNFARQVEAGMTHVNDITVNDEAHVMFGGEKNSGLGRFNGEWAIEEFTTTHWVGVAPGQAQFPF

SEQ ID NO: 11918 - protein, 205 aa, Schizosaccharomyces pombe
MAMFSLEIPAISAETSKKLVVVGDGGCGKTCLLIVFSSGTFPERYVPTVFENYITDITYGPNSKVIELALWDTAGQEEYDRLRPLSYPNSNVILLCFSIDCPASLNNVTEKWYPEVQHFCPRTPIVLVGLKADLRKDRNATEVLRTQGLTPVTYQQAQSVALSMNAPYVECSAKENTGVNEVFQLAVGLTIKKSFSFSKKSCVIL

SEQ ID NO: 11919 - protein, 475 aa, Streptomyces coelicolor A3(2)
MSLHQGPRPSRDSDRDRRRLAVNPFHAAANPLGGMTEAPPAHRLPDSPLPPESAYRLVHDELMLDGNARLNLATFVTTWMEPQAGVLMSECRDKNMIDKDEYPRTAELERRCVAMLADLWHAPDPSTAVGCSTTGSSEACMLAGMALKRRWALRNADRYPAKDVRPNLVMGVNVQVCWDKFCNFWEVEARQVPMEGDRFHLDPQAAAELCDENTIGVVGILGSTFDGSYEPVADLCAALDALQERTGLDVPVHVDGASGAMVAPFLDEDLVWDFRLPRVASINTSGHKYGLVYPGVGWALWRDAEALPEELVFRVNYLGGDMPTFALNFSRPGAQVVAQYYNFLRLGREGYRAVQQSARDIAGSLAERVAALGDFRLLTRGDQLPVFAFTTADDVTAYDVFDVSRRLREGGWLVPAYTFPPHREDLSVLRVVCRNGFSADMADLLLADLERLLPELRRQPGPLTRDKGAATGFHH

SEQ ID NO: 11920 - protein, 81 aa, Glycine max
SNSYTRAVHQLSHRARGTAWLHPYTGLKSMAGLPTRKTNTDITSIASNGGRVQCMQVRPPAGSMKFETLSYLPDLDDAQLA

SEQ ID NO: 11921 - protein, 509 aa, Brassica juncea
MTSVNVKLLYHYVITNLFNLCFFPLTAIVAGKAYRFTIDDLHHLYYSYLQHNLITIASLFAFTVSGFGLYIATLPKPLYLVEYSCYLPPRHLKVSVSKIMDIFYQIKADTSSRNVACDDPSSLDFLRKIQERSGLGDETYSPEGLIHVPPRKSFAGSREETEKVIIGGIENLFENTKVKPKDIGILVVNSSKFNPTPSLSAMVVNTFKLRSNIKSFNLGGMGCSAGVIAIAIDLAKDLLHVHKNTYALVVSTEGITQGIYAEENRSMMFSNCLFRVGGAAILLSNKSGDRRRSKYELVHTVRTHTGADDKSFRCVQQGDDEDGKTGVCLSKDITNVAGTTLTKHIAICRPLILPLSEKFLFFATSVAMKLLKDKIKHYYVPDFKLAVDHFCIQPGGRAVIDELEKNLGLSPIDVEASRSTLHRFGNTSSSSIWYELAYIEPKERLKKGNKKGWQIALGLGFKGNSAVWVALNNVKASANSPWEHCIDRYPVKNDSDLSKSKTQVQNGRS

SEQ ID NO: 11922 - protein, 173 aa, Zea mays
  misc_feature (158)..(158): Xaa can be any naturally occurring amino acid
  misc_feature (170)..(170): Xaa can be any naturally occurring amino acid
MCDNKGNSEGHSTLLLGKYELGRVLGHGTFAKVYHARNLQTGKNVAMKVVGKEKVIKVGMMEQIKREIAVMKMVKHPNIVELHEVMATKSKIYIAMELVRGGELFNKVAKGRLKEDIARVYFQQLISAIDFFHSRGVYHRDLRPENLLLDEHGNLKVXDFGLSTFSEHLXQDG

SEQ ID NO: 11923 - protein, 324 aa, Glycine max
MATLVLYQFFLKLLLLISVFQLSFAARRLNQLVQDQSQLLHYHNGPLLYGKIAVNLIWYGHFKPSQKAIITDFVTSLSSPSSQSSQPSVATWWKTTEKYYHLSPKNKKAASSLSLSLGDQFLDEGFSLGKSLTSKNLVELASKGGQRNAINVVLTSADVAVEGFCMSRCGTHGSSSSASHVKKNNNGKNYKFAYIWVGNSETQCPGQCAWPFHQPIYGPQSPPLVAPNNDVGLDGMVINLASLLAGTATNPFGNGYFQGPAEAPLEAASACPGVYGKGAYPGYAGNLLVDSATGASYNVEGDNGRKYLVPALYDPSTSSCSTPV

SEQ ID NO: 11924 - protein, 62 aa, Triticum aestivum
  misc_feature (28)..(28): Xaa can be any naturally occurring amino acid
GGSFGVGDTCEHHFESKADSCAFKTYPXQAGAIRKGGHIAIKALPCKGGEVSTCKTGKHGHA

SEQ ID NO: 11925 - protein, 342 aa, Triticum aestivum
  misc_feature (151)..(151): Xaa can be any naturally occurring amino acid
  misc_feature (183)..(183): Xaa can be any naturally occurring amino acid
AASLPGAPALIEKPPTRPESAARAPPRLPPRAPQSAGGAPPRSPPRHTPEPGSRAAVRRRAEAGVRARAMDVDSVECLSLPDAAMDADDVGLALHPHGGILAAASRPAAYPKAGAGAGGIVAPGSSVHELLECPVCTNSMYPPIHQCQNGXYIKVKHAALCSFRPYSCPYAGSECSVTGDIPXYLVNHLRDDHKVDMHSGCTFNHRYVKSNPREVENATWMLTVFHCFGQYFCLHFEAFQLGMAPVYMAFLRFMGDENEARNYSYSLEVGANGRKMVWEGTPRSVRDSHRKVRDSHDGLLIQRNMALFFSGGDRKELKLRITGRQEKETQTPPQAACVTATG

SEQ ID NO: 11926 - protein, 371 aa, Agrobacterium tumefaciens str. C58
MECCRFSRTAAILDANRNWREETRMRGVVIHAAKDLRVEDVAGQPLAADEVRVAVAVGGICGSDLHYYNHGGFGTVRVREPMALGHEFAGTVVEVGSSVSHLVPGMRVAVNPSLPCGTCRYCAQGRQNQCLDMRFMGSAMRSPHVQGGFREVVTVHSTQPVQIADGLSMGEAAMAEPLAVCLHAARQAGSLLGKTVLITGAGPIGMLSLLVARLAGAAHIVVTDVADAPLDLARRIGADEAVNILRDADMLEKYRFEKGVFDVLFEASGNQAALLPALDLLRPGGIIVQLGLGGDFTIPMNLIVAKELQLRGTFRFHEEFAQAVNMMGRGLIDVKPLISATLPFDQAREAFDLAGDRAKSMKVQLAFSGAA

SEQ ID NO: 11927 - protein, 145 aa, Thermoanaerobacter tengcongensis MB4
MSLMRRGRDWWDWPFDINIRNLPSIFDINFPSLSGLFSRPRVDIVESETEIVATAELPGVDKKDIEINVYDNILEIKGQTSVDEEKEDKNYYIRERYYGSFARRIELPAEVDPERTTAKFENGILKITMPKLHPSKPKKRRIDIE

SEQ ID NO: 11928 - protein, 214 aa, Ustilago maydis
MAPAAICRKLVIVGDGACGKTSLLCVFAIGEFPQEYEPTIFENYVAEIRLDGKPVQLALWDTAGQEEYERLRPLSYSQAHVILIAFAIDTPDSLENVQVKWMEEVRQICGPSVPVLLVGCKKDLRENAIAKGKPVQGHYVKRQQAKLVAAQIGARSYHECSSLNNQGVDAVFEAATRAAMLVRNSGASSGGAISQSKTKEALHNDAGSCKCIVL

SEQ ID NO: 11929 - protein, 201 aa, Anaplasma phagocytophilum
RSEITFIDGNKGTLRYRGIDIENLIGAPNSFSSIVYLLLKGTLPSATEHEEFARILGAEYDVPEQVMNVIRSFPRDSHPMAILIASFSALAANYHASRIDPLTGAIIAIAKVPGIVASIYRHVANLDFIQADANLEYTHHFIRMMFGNMDEAHRDIMHKALDAIFIMHADHEQNASTATVRMSGSSGAGLFACLCAGVATL

SEQ ID NO: 11930 - protein, 503 aa, Pectobacterium carotovorum
MSNSFCVVYKGSDTDINNIQRDFDGKGEALSNGYLFIEQNGHYQKCEMERGTAYLIGSLYNRTFLIGLAGVWEGEAYLANDAELLALLFTRLGANALALAEGDFCFFIDEPNGELTVITESRGFSPVHVVQGKKAWMTNSLKLVTAAEGEGALWFEEEALVCQSLMRADTYTPVKNAQRLKPGAVHVLTHDSEGYSFVESRTLTTPASNQLLALPREPLLALIDRYLNAPLEDLAPRFDTVGIPLSGGLDSSLVTALASRHFKKLNTYSIGTELSNEFEFSQQVADALGTHHQMKILSETEVINGIIESIYYNEIFDGLSAEIQSGLFNVYRQAQGQVSCMLTGYGSDLLFGGILKPGAQYDNPNQLLAEQVYRTRWTGEFATHGASCYGIDIRHPFWSHSLISLCHALHPDYKIFDNEVKNILREYADSLQLLPKDIVWRKKIGIHEGSSVNQAFANVLGSTVDNYQTKSRFTYRVYQAFLRGRLSITDVTPSQLKDLIKKD

SEQ ID NO: 11931 - protein, 193 aa, Ustilago maydis
MQTIKCVVVGDGAVGKTCLLISYTTNAFPGEYIPTVFDNYSANVMVDGKPVSLGLWDTAGQEDYDRLRPLSYPQTDVFLVCFSLVSPPSFENVRTKWWPEVSHHAPNIPTILVGTKLDLREDPETIAKLRDRRMQPITYAQGNQMARDIHATKYLECSALTQKGLKGVFDEAIRSVLAPAPVQSKKKNNCLIL

SEQ ID NO: 11932 - protein, 160 aa, Triticum aestivum
MAGMVFGLDDPMMTALQHLLDIPDGEAGGTAGGEKQGPTRAYVRDARAMAATPADVKELPGAYAFVVDMPGLGSGDIQVQVEDERVLVISGERRREEKEDAKYLRMERRMGKLMRKFVLPENADMEKISAACRDGVLTVTVEKLPPPEPKKPKTIQVQVA

SEQ ID NO: 11933 - protein, 301 aa, Picrophilus torridus DSM 9790
MIDPEIKEIIENAGPLNPADIKIDEFRALMDNLAIEMSREKIKVREVTDIKINNIKSRLYNDSDSDGIIIYMHGGGFVFGSIESYDNICRYIAKCSGLKVLSVDYRLAPENKFPAALDDSFEAFKYVYDHYSDLRIKMDRICLAGDSAGGNLAASLSLKIYDELGVKPGLDVLFYPSLAPDTFSRSFSEYNDGPVLTGDLIQWFGSQYYKNFYDVLNPYFSPMLGDLSKMPESIVVTAEYDPLRDQGESYLKMLRKANVRATGIRSLMMVHGFATDFEYVSAARNILFMVYSLAGNIINKL

SEQ ID NO: 11934 - protein, 201 aa, Anaplasma sp. KhabIx
RSEITFIDGNKGILRYRGIDIENLIGAPNGFSSIIYLLLKGTLPSETEHEEFARILGTEYDVPEQVMNVIRSFPKDSHPMALLIACFSVLAAQYHASHIDSLTSALIAVAKVPGIVASIYRHATNLEFIQADANLEYTHNFIKMMFGDTNEEHRDIIHKALDAIFIMHADHEQNASTSTVRMSGSSGAGLFACLCAGVATL

SEQ ID NO: 11935 - protein, 478 aa, Gossypium hirsutum
MDSTSKSNAATSSKKDANNGQTLLLGRYEVGKLLGHGTFAKVYHARNVKSGDNVAIKVIDKEKILKSGLIAHIKREISILRRVRHPNIVQLFEVMATKSKIYFVMEYVRGGELFNKVAKGRLKEDVARKYFQQLISAVHFCHARGVYHRDLKPENLLLDENGDLKVSDFGLSAVSDQIRQDGLFHTFCGTPAFVAPEVLARKGYDAAKVDIWSCGVILFVLMAGYLPFQDQNIMAMYKKIYKGEFRCPRWFSPELIRLLTKLLDTNPETRITIPEIMEKRWFKKGFKHIKFYIEDDKLCSVEDDDNDVGSCSDQSSMSESETELETRKRVGTLPRPASLNAFDLISFSPGFNLSGLFEEGEEGSRFVSGAPVSTIISKLEEIAKVVSFTVRKKDCRVSLEGSREGAKGPLSIAAEIFELTPSLVVVEVKKKGGERGEYEDFCNRELKPGLKELMVEESQSSAAASLATSSSYLPSDTE

SEQ ID NO: 11936 - protein, 323 aa, Heterocapsa triquetra
MAPAKTSSAAMLGLGAAGWLSSGSLFVSPTPPRAAELSRYAPQATAAPAAGASQGFAPGVRCSILGVAAVTVAAGARRVARRATQDELKKQVGYKAVDDYVKSGTVIGLGTGSTAAFAVERVGQLLKSGELKDIIAIPTSIRTKEQAESLGIPLATLDTHSDLDVAIDGADEVDPNLNLVKGGGGALFREKIVEMCAKKFIVIVDESKMCGGLGPGFPIPVEIVPFCHEHTMREIAKLPALAGCKPVLRLGDVANNKPDGDKPAVTDNSNYIVDLVFETPIKDAVAAGEQLKNTVGVVDHGLFTGMTTACIIAGSDGISVKEA

SEQ ID NO: 11937 - protein, 233 aa, Triticum aestivum
WLGNRRRIIVMNREDMVSADDRNAWATYFSSQGIKVIYSNGQLGMGTMKLGRMAKSAASTVNTRRREKGLLPRPVRAGIVGYPNVGKSSLINRLLKRRMCPAAPRPGVTRELKWVRFGKDLELLDSPGILPMRISDQAAALKLAICDDIGERSYDFADVAAILVQILLRHPAVGSEAFRKRYKIDVDSDCGKLFVTKLSVHLFNGDTTQAAFRILSDFRKGRFGWVALERPPT

SEQ ID NO: 11938 - protein, 255 aa, Glycine max
  misc_feature (198)..(198): Xaa can be any naturally occurring amino acid
  misc_feature (231)..(231): Xaa can be any naturally occurring amino acid
  misc_feature (243)..(243): Xaa can be any naturally occurring amino acid
MRAMEDHFTLLSLDDGSLYVDVSGGALWEDVLKRCVSEFRLAPRSWTDYLGLTVGGTLSNAGVSGQAFRYGPQTANVTELEVVSGKGETLVCSESQNSELFFATLGGLGQFGIITRARVPVQQAPDMVRWIRVVYTEFGDFTRDAEWLVTLREGDGFDYVEGFVFVNSDDPCNGWTTVPVGPNQYFDPVRIPSTAGPXLYCLELALHYRNQDHPSAVDMEVDRLLGRLRFXEGLKFSVDVTYXEFLLRVKRVEGD

SEQ ID NO: 11939 - protein, 490 aa, Burkholderia cepacia R1808
MPLTLSRTELVRTANLVDGSWRAALDGRCFDVTNPATLDTIAYAPDSGAADARAATDAAARALPAWRATPARERAAILRAWHAAIVAHTDDLAKLMSLEQGKPLAEARGEVAYGASYVLWFAEEATRTYGDLIPQQQRGKQLSAVKVPIGVVAAITPWNFPLAMIARKIAPALAAGCTVVAKPAEDTPLTALALGFLAMEAGVPPGVLNLIAASRERGIDAVADWLADARVRKITFTGSTAVGKLLARESAATLKKLSLELGGNAPFIVFDDAQLDAAVDGLMAAKFRNGGQTCVSPNRVYVQAGVYDAFAAKLAARVAALKVAPATDPAAQIGPMINARAVDKIARHVGDALERGARVLTGGRRLSQLGPNYYAPTVLADATADMQLSCEETFGPVAALFRFDTEEQAVDAANDTPFGLAAYFYTQDVRRIARVSARLETGIVGINEGALASEAAPFGGVKESGYGREGSKYGLDDYLSIKYLCQGGLD

SEQ ID NO: 11940 - protein, 352 aa, Rhodococcus sp. TK6
MRVFAVQPDDTAIHDLEVPTPSPEGRQVLLKVVRAGVCHTDTHLRAGGYDLGSRGMMSMKARGIEYPMVLGHEVVGVVEKVGDSVESVRVGDVRLIYPWIGCGECRQCREGHDNRCAAGKNLGVARHGGYAEYILVPDEKYLVDIDGLDPSWAATLACSGLTAYSAVDKVLPLEPDEPVVVFGAGGLGLTAIAILRSRGHRNICAVDVAERNLALAQDMGASSTVLSGPGSGADDIRRAAGGPASAVIDFVNNGVTATAAFEVLAKAGIMVQVGLFGGEVTLPTALLALRMIRIEGSFVGTPAQMQELVRLAQRGALPHIPLVERPLSAAAVSQALDDLTAGGVAGRIVLTA

SEQ ID NO: 11941 - protein, 362 aa, Bacillus sp. KSM-K16
MNDSIPKKMKAVVAYGPKDYRLEEVDVPVIEHDKEIIVKVEATGICAGDIKAFDGAPSFWGDDTQPAYIKAPMIPGHEFIGHVVAKGDGVGDFEIGDRIISEQIVPCWECRFCNRGQYWMCEKHDLYGFQNNVNGSMAEYMKFTKEAINYKVPADLPIEQAILIEPYACSMHAVQRARIELGDIVVLSGAGTLGLGMIGAVKKSGAKTLVVLDLKDERLALAQQFGADVVLNPAKDNVVEKVKDMTDGYGCDVYIEATGHPASVEQGLSMIRKLGRFVEFSVFKDPVTVDWSIISDRKELDVLGSHLGPYCYPLVIEGIANGDLPTEGVVTHELPLERFAEGFELMKNGSNSLKIILKPQQA

SEQ ID NO: 11942 - protein, 121 aa, Glycine max
EKQLVSVTKDTRKGGPLEGAHVHIVHLSDSSASLDLIKEAKSHGDSISVETCPHYLAFTSEEIPNGDTRFKCSPPIRDAYNKDKLWEAVLVRFLSKNTNYSLSFMIIYDLICFLHVLLFIS

SEQ ID NO: 11943 - protein, 460 aa, Rhodococcus sp. TK6
MGVYTTTDPATGEEVAQYPEISDAELDELIGRSAAAYRSWRTTPLEQRRAVLARAAEIHREQADELAALLTLEMGKPITQAKGEVALVASIYQYYADHAEEFMADEPLDIAGSGTAVVRTEAIGPLVGVMPRNYPFYQVARFAAPNIALGNTIILKHARNCPQSALALERVLTEAGLPDGVYLNAFISSAQVAAAIADPRIQGVSLTGSEKAGSAVGEVAGRHMKKCVLELGGSDPFIVLGDADVDAAASAAVVGRLGNGGQACTASKRFLVEEPVYDEFVRKFLDGMTGWQPSDPASPETKLGPLSSRSAVDELDELVQDAVSHGAEVLTGGDRPDEKGAYYPPTVLVGVTPEMRAYHEELFGPVVVVHRVGSLDEAIEAANDSPFGLSSSVFTSDPDKADRVAEELETGMVWINSTSKSSPDLPFGGVKRSGVGRELARFGFNEFANKKLVRNPGGKK

SEQ ID NO: 11944 - protein, 397 aa, Oryza sativa (japonica cultivar-group)
MLTCIACSKQLAGGAPPLREQSDDADDAAVARGAGECATPSTRQAIKALTAQIKDMALKASGAYRHCKPCAGSSSSSPAAGARRHHPYHAYADSGSDRFHYAYRRAGSGGDATPSVSARTDFLAGDEEEEEEEEEEEGTTADGSEDDEAKEWVAQVEPGVLITFLSLPEGGNDLKRIRFSREIFNKWQAQRWWAENYEKVMELYNVQRFNQQTPLPTTPKSEDESLKEDIPATPPLNSERLPHTLHRSLTGGRTTGYGQPDSLGHQHNLGNGHRQQHHHCYTGHQCYGSVGLASTPKLSSISGAKTETSSMDASMRSSSSPEEVDRSRELSVSVSNASDQEREWVEEDEPGVYITIRALPGGIRELRRVRFSREKFSEMHARLWWEENRARIHDQYL

SEQ ID NO: 11945 - protein, 180 aa, Chloroflexus aurantiacus
MAKQRLRVIPLGGAGEVGRNMWVVEYGDDIVILDCGVMFPDADMLGVDLVLPDITYLREKTDHIRGILLTHGHEDHIGAVPHLIADLGFPPIYGTKLTLGLLGNRLREHRLHDKVTTVQSMNGCRSRWSVHVEASNCQSFPMRRLAYHLRLRLRARGAITRCGATSGSCDGIHPGRTMSC

SEQ ID NO: 11946 - protein, 299 aa, Glycine max
  misc_feature (162)..(162): Xaa can be any naturally occurring amino acid
MVYVKSQKSKAYFKRYQVKFKRRREGKTDYRARIRLINQDKNKYNTPKYRFVVRFSNKDIVAQIISASIAGDIVLAAAYAHELPRYGLEVGLTNYAAAYCTGLLLARRVLKTLEMDEEYEGNVEATGEDYSVEPAESRRPFRALLDVGLIRTTTGNRVFGAXLKGALDGGLDIPHSDKRFAGFDKEKKELDAEVHRKYVFGGHVAAYMKILAEDEPEKYQSHFSEYIKRGIEADGIEALYKKVHAAIRADPSLKKSEKQPPKEHKRYNLKKLTYEERKAKLIARVAAINSAADNDEDDE

SEQ ID NO: 11947 - protein, 451 aa, Triticum aestivum
  misc_feature (29)..(29): Xaa can be any naturally occurring amino acid
  misc_feature (169)..(169): Xaa can be any naturally occurring amino acid
MAASEGAMRMGKYEMGRTLGEGHFGMGRXSGRGTSGRAFVAKIPDPERVLAMKIDEQIKTEIATLKLLKHPNVVRLYEVAASKTKIYMVLEYVNGGELFEKIALKGKLSEKEGRKLFQQLMDAVSYCHERGVYHRDLKPENVLVDAKGNIKVSDFGLSALPQHQRRTRXLHTTCGSPNYIAPEVLLNKGYDGSMSDVWSCGVILYVMLTGNLPFDDENMVVLYQKILKGDYRIPKWLSPGAQDILRKLLDPNPITRLGMDGLREHDWFNQSYTPAVPFDDDDDNYVGDDNSHMTKHNGIPDNPAINQMNAFQLIGMSSCLDLSGFFEKEDVSERKTRFASNYPPTYLFEKIESNVINMGFQVQKNNGKLKVIQERKGPTNPRGHGSLLISAEVFEINESLYVVELKRSCGDCSLYRQLCATLSDDLGICKSQQLLKNDSIRQELYRFNSSF

SEQ ID NO: 11948 - protein, 493 aa, Agrobacterium tumefaciens str. C58
MRSKVMRRFQCYIDGRFEDGEASFSSLDPATGQPWAEMPESREADIGRVVEAAHRALYEDTVWSKLTATQRGKLLYRLADLVAENAKTLAELETRDTGKIIRETSAQIAYVADYYRYYAGLADKIEGAYLPIDKPDMDVWLRREPVGVVAAIVPWNSQLFLAAVKIGPALAAGCTIVVKASEDGPAPLLEFARLVHEAGFPAGVVNVVTGFGASCGNALTTHPKVAHIAFTGGPETARHIVRNSAENLASTSLELGGKSPILVFADADLESAANAQVAGIFAATGQSCVAGSRLIIEKSVKDRFLQILAAKAEAIRIGSPLDMATEVGPLATERQRKHIVSLVSASVDAGAKVVTGGEPVEGEGYFYRPTILDCDGIRSPSLEKEFFGPVLSVVSFETEAEAISLANDTVYGLASGVFTQNLTRAHRLMKAIRAGIVWVNTYRAVSPIAPFGGFGLSGDGREGGLAAALDYTRTKTIWLRTSDDPIPDPFVMR

SEQ ID NO: 11949 - protein, 490 aa, Triticum aestivum
MDPNSFKTGGLLLPTIERRCASPPSVIVIGGGISGIAAARVLSNSSFEVTVLESRDRIGGRVHTDYSFGCPIDMGASWLHGVSNENSLAPLISHLGLRLYHTSGDNSVLYDHDLESCSLFDKNGLAVPMETAAKVGVIFEKILKETVKLRDEQEHDMPLEQAISMVLERHPDLKLEGLDDRILQWCVCRLEAWFAADADEISLKNWDQEHVLTGGHGLMVDGYFPVIQALAQGLDIRLNQRVKKIARQQKGVTVTIEDGTQYSADACIITVPLGVLKANIIKFEPELPSWKSSAIADLGVGIENKVAMHFDKAFWPNVQVLGMVGPTPKTCGYFLNLHKATGHPVLVFMAAGRFAQDVEKLSDKEAVELVMCHLRKMIPDATEPSQYLVSRWGSDPNSLGSYSCDLVGKPSDVCERFSAPVESVLYFAGEAASAEHSGAVHGAYSSGMDAAEECRRRLLMRKGVPDLVQVGAAACEEMADVVAPLQICRT

SEQ ID NO: 11950 - protein, 186 aa, Brassica napus
  misc_feature (42)..(42): Xaa can be any naturally occurring amino acid
LDPRVRTGAKLSRSEHSMGASSEPKSIYDFTVKDAKGNDVDXSTYKGKVLLIVNVASQCGLTSTHASELAQLYQKYKDHGFEILAFPCNQFGNQEPGSNEEIVQFACTRFKAEYPIFDKVDVNGDSAAPIYKFLKSSKGGLFGDGIKWNFAKFLVDKDGNVVDRYAPTTSPLSIEKDLKKLLGVTA

SEQ ID NO: 11951 - protein, 388 aa, Photorhabdus luminescens subsp. laumondii TTO1
MSEQNTMTELTTFKPKKSVALSGVSAGNTALCTVGKTGNDLHYRGYDILDLATQCEFEEVAYLLVHEKLPSRAELAAYKAKLTALRGLPGSVKAALETLPAAAHPMDVMRTGVSVLGCTLPEKDDHNLAGARDIADRLLASLSSILLYWYHYSHNGRRIEVETDDVSIGGHFLHLLHGKKTCESWEKAMHTSLILYAEHEFNASTFTSRVIAGTGTDIYSAIIGAIGALRGPKHGGANEVSFEIQQRYENPDEAERDILARLARKEVIIGFGHPVYTISDPRHKVIKDVALQLSKEAGTTKMFNIADRLEAVMWANKKMFPNLDWFSAVSYHMMGVPTAMFTPLFVIARTAGWAAHIIEQRIDNKIIRPSADYTGPENRVFTPIGKRG

SEQ ID NO: 11952 - protein, 342 aa, Burkholderia cepacia R1808
MKALAKLERAPGLTLTRVKRPEVGHNDVLIKIRRTAICGTDIHIWKWDDWAQKTIPVPMHVGHEYVGEIVEMGQEVRGFAIGDRVSGEGHITCGFCRNCRAGRRHLCRNTVGVGVNREGAFAEYLAIPAFNAFKIPPEISDDLASIFDPFGNATHTALSFNLVGEDVLITGAGPIGIMAVAIAKHVGARNVVITDINDYRLELARKMGATRAVNVARESLRDVMAELRMTEGFDVGLEMSGVPSAFTSLLEAMNHGGKVALLGIPPAQTAIDWNQVIFKGLEIKGIYGREMFETWYKMVAMLQSGLDLSPIVTHRFAVDDYEKGFAAMLSGESGKVILDWTA

SEQ ID NO: 11953 - protein, 201 aa, Glycine max
  misc_feature (19)..(19): Xaa can be any naturally occurring amino acid
  misc_feature (30)..(31): Xaa can be any naturally occurring amino acid
  misc_feature (112)..(112): Xaa can be any naturally occurring amino acid
  misc_feature (120)..(120): Xaa can be any naturally occurring amino acid
  misc_feature (160)..(160): Xaa can be any naturally occurring amino acid
GPRIGRFDRSGRSVALRGXHSASLVVLGTXXLWFGWYGFNPGSFLTIAKGYESGGYYGQWSAIGRTAVTTTLAGSTAALTTLFSKRLLAGHWNVIDVCNGLLGGFVACHSDXTLVEQWTXVCEWVSDGVAFVLGLISQPRRYSTMICWSAAQFHGGCGAXGIYVTGLFAKKEYVEEIYGGGRPFGALMGGGGRLLAAQVIQ

SEQ ID NO: 11954 - protein, 484 aa, Agrobacterium tumefaciens str. C58
MHLNDPTLFCEKVPVAGRWIGCDDRETATIRNPATGKIVGQVPELGATETQAAITAAVIAQKAWARRTAGERAAILKAWHRLVMENRDDLGMILTLEQGKPLAEAKGEIAYGASFIEWFAEEARRINGETVPGHQADKRILVLRQPVGVVAAITPWNFPNAMITRKVGPALAAGCAVVLKPAPQTPFSAIALAILAERAGLPLELFSIVTGPAAEIGGVLTASPDIRLLTFTGSTRTGEHLYRQCAPTIKKLGLELGGNAPFIVFNDADLDAAVEGALIAKFRNNGQTCVCANRLYVQSGVYDAFAEKFARAVSGLKVGNGLEEGSILGPLIDGNAVAKVEAHIADALSKGAQIAAGGSRYALGGNFFEPTILRNVTADMQVAREETFGPLAPLFRFEDEEDVIAQANNTDFGLASYFYARDLSRVFRVAEALEYGMVGVNTGAISTAEAPFGGVKMSGLGREGSRHGIEEYTELKYVCIGNIL

SEQ ID NO: 11955 - protein, 517 aa, Glycine max
MAEVAPPKKENPNLLLGRFELGKLLGHGTFAKVHHARNIKTGEGVAIKIINKEKILKGGLVSHIKREISILRRVRHPNIVQLFEVMATKTKIYFVMEYVRGGELFNKVAKGRLKEEVARNYFQQLVSAVEFCHARGVFHRDLKPENLLLDEDGNLKVSDFGLSAVSDQIRQDGLFHTFCGTPAYVAPEVLSRKGYDGAKVDIWSCGVVLFVLMAGYLPFNDRNVMAMYKKIYKGEFRCPRWFSSELTRLLSRLLDTNPQTRISIPEVMENRWFKKGFKQIKFYVEDDRVCSFDEKLLLHHDDDLATSDSEVEIRRKNSNGSLPRPASLNAFDIISFSQGFDLSGLFEEKGDEARFVSSAPVSKIISKLEEVAQLVSFSVRKKDCRVSLEGCREGVKGPLTIAAEVFELTPSLVVVEVKKKGGDKAEYEKFCNSELRPALENLGMEESASSSSSCHQSTHTQSEFQQHRTLSDSALNRHSDNECLFERELGLADETSISQHGESKFECQQENMAMFTI

SEQ ID NO: 11956 - protein, 160 aa, Glycine max
  misc_feature (99)..(99): Xaa can be any naturally occurring amino acid
  misc_feature (152)..(152): Xaa can be any naturally occurring amino acid
ASSMISSPAVTTVNRAGAGMVAPFSGLKSIAGFPTKKTNNDITSIATIRGKVQFLHVWPPLGKKKIDTLSYLPYLDDAQLPNELEYLLTNVWIPCLEFXMEHIFMYREHYTSPGYYNSRYCTMLKLPMVGCTDASRVIKELLQAKTAYPNGXFIRIIGFD

SEQ ID NO: 11957 - protein, 283 aa, Picrophilus torridus DSM 9790
MEFYLGKTGERISSIGIGTWQMKSNDQSIMAIRAGLDAGSNFVDTAEAYRNEAMVGRAIESREVFIATKVFPNHFKYDSLIRACENSLKRLNVKTIDLYQLHWPNRHVDIKETMKAMEHLVDTGMIRYIGVSNFNVNELKSAMSAMSKYEIVSNQVEYNPLVRYIEPEISEFCRKNSISIIAYSPLMHGHDIDPISKDESPFNIIANKRNATVRQVILAWILSKNFFAIPKSNVPEHVIENVKSMNINLSSEETSMIDHYVSRFNKKSLKERYGNIISFVSRF

SEQ ID NO: 11958 - protein, 449 aa, Xylella fastidiosa 9a5c
MNPTLIVNARLVNEGREFDSDLRIENGRIARIDTGLSAQSKDIVIDAAGRRLLPGMIDDQVHFREPGLTHKGDIASESAAAVAGGLTSFMDMPNTNPPTLDVAALQAKYDAASGRAWGNYGFYLGASNDNLAAIQALDPKTSPGIKVFMGASTGNMLVDNEATLEGIFRDAPTPIITHCEDTPTINATLAKYQSRYGDTLSAEQHPDIRSRQACLKSSQLAVSLAKKNGTRLHVLHISTADELRLFEAGPLVDAAGKRRKQITAETCIHFLHFDRMDYARLGNLIKCNPAIKEVSDREALIAALAKDVIDVLATDHAPHTWEEKQQPYAQAPSGLPLVQYALVAALELVHAGRLSVTEIVRKFAHAPAQLFDVTGRGFLREGYWADLVLVEDTPFTVKRQEILSKCGWSPFEGTTFRSRIASTWVNGHHVWDGNRLVGVPNGQRLEFDR

SEQ ID NO: 11959 - protein, 147 aa, Triticum aestivum
  misc_feature (140)..(140): Xaa can be any naturally occurring amino acid
MSDEEHHFESSDAGASKTYPQQAGNIRKGGHIVIKGRPCKVVEVSTSKTGKHGHAKCHFVAIDIFTAKKLEDIVPSSHNCDVPHVNRVDYQLIDISEDGFVSLLTDSGGTKDDLKLPTDDNLSALMKSGFEEGKDVVVSXVMSSMGE

SEQ ID NO: 11960 - protein, 359 aa, Capsicum annuum
MDSTNQNLTQTEDEAFLFAMQLASASVLPMVLKSALELDLLEIMAKAGPGAAISPSELAAQLPTKNPEAPVMLDRMLRLLATYSVLNCTLRTLPDGRVERLYSLAPVCKLLTKNADGVSVAPLLLMNQDKVLMESWYHLTDAVLDGGVPFNKAYGMTAFEYHGTDPRFNKVFNRGMSDHSTMTMKKILEDYKGFEGLNSIVDVGGGTGATVNMIVSKYPSIKGINFDLSHVIEDAPAYPGVEHVGRDMFVSVPKADAIFMKWICHDWSDEHCLKFLKNCYEALPANGKVLVAECILPETPDTSAATKNAVHVDIVMLAHNPGGKERTEKEFEALAKGAGFTGFRRACCAYQTWVMEFHK

SEQ ID NO: 11961 - protein, 336 aa, Rubrobacter xylanophilus DSM 9941
MARTVTLIPGDGIGPEVTGSAKEVIGALGVDIEWEIAEAGETVMEREGTPLPEYVLESIRRNKVALKGPLTTPVGTGFRSVNVALRKELDLYANIRPALSLPGLDLPYRDIDILLFRENTEDLYAGVEHMVGKHAAESIKIITREGTERICRMAFEYSRDQGRRHVTVVHKANIMKYTDGLFREVFYEVARDYEDDFEEIDERIVDNMAMQLVMKPNLYDVLVCPNLYGDILSDLCAGLTGGLGVAPGANIGEDIALFEPVHGSAPKYAGQNRANPLATLLSAKNMLYYLGYGEAADRMQGAINAALKNPETRTKDLGGSAGTREFTRAVISNLTG

SEQ ID NO: 11962 - protein, 179 aa, Zea mays
  misc_feature (43)..(43): Xaa can be any naturally occurring amino acid
  misc_feature (80)..(80): Xaa can be any naturally occurring amino acid
MATSFQGTTTTCTACDKTVYLVDKLTADNRIYHKACFRCHHCXGTLKLANYNSFEGVLYCRPHFDQLFKRTGSLDKSFEXATKVSSAFAGTREKCVGCSKTVYPTERVTVNNTMYHKSCFKCCHGGCTISPSNYIAHEGKLYCKHHHIQLIKEKGNFSQLENDHEKTSQAGSLEEDEQE

SEQ ID NO: 11963 - protein, 466 aa, Burkholderia cepacia R1808
MNQAALIEADRQHLIHPVVNYRAHEARGVTVLESADGVFLRDGDGHTLLDAFSGLWCVNVGYGRESIVKAAAEQMAKLPYATGYFHFGSQPAIELAERLAALAPPSLNRVYFTLGGSDAVDSAVRFITHYFNATGRPSKKQMIALERGYHGSSSIGAGLTALPAFHRHFDLPRADQHHIPSPYPYRHPLGDDPQALIAASVAALEAKVAALGADNVAAFFCEPIQGSGGVIVPPAGWLKAMRDACRRLGILFVADEVITGFGRTGPLFACETESVEPDLMTVAKGLTAGYAPMGAVLMSDEIYEGLAGSRTESAVVGHGHTYSAHPVSAAIGLEVLKLYHEGGLLANGRAQAPRFAAGLDALRAHPLVGDARSAGLLGALELVADKARKTRFDPALNVPDKIAAAAYANGVVFRAFGDGVLGFAPALSFTAGEFDLMFERVRKTLDDVLADPGVQRALDAAHAQPA

SEQ ID NO: 11964 - protein, 534 aa, Zea mays
MAVVYYLLLAGLIACSHALAAGTPALGDDRGRPWPASLAALALDGKLRTDSNATAAASTDFGNITSALPAAVLYPSSTGDLVALLSAANSTPGWPYTIAFRGRGHSLMGQAFAPGGVVVNMASLGDAAAPPRINVSADGRYVDAGGEQVWIDVLRASLARGVAPRSWNDYLYLTVGGTLSNAGISGQAFRHGPQISNVLEMDVITGHGEMVTCSKQLNADLFDAVLGGLGQFGVITRARIAVEPAPARARWVRFVYTDFAAFSADQERLTAPRPGGGGASFGPMSYVEGSVFVNQSLATDLANTGFFTDADVARIVALAGERNATTVYSIEATLNYDNATAAAAAVDQELASVLGTLSYVEGFAFQRDVAYAAFLDRVHGEEVALNKLGLWRVPHPWLNMFVPRSRIADFDRGVFKGILQGTDIVGPLIVYPLNKSMWDDGMSAATPSEDVFYAVSLLFSSVAPNDLARLQEQNRRILRFCDLAGIQYKTYLARHTDRSDWVRHFGAAKWNRFVEMKNKYDPKRLLSPGQDIFN

SEQ ID NO: 11965 - protein, 256 aa, Selaginella remotifolia
ETWLVTTTSSSNPEVGLATGLAATGGAQDLLNPPLNKQKEPPVGRGKIEIKRIENATSRQVTFSKRRGGLLKKAHELSVLCDAQVALIIFSSTGKLFEYASTSMKEILDRYGKYPESVQGGNMASHHEASDFISHEIRRLKQQLQRSQQSRRHLLGDDLSHLPIKDLQNLEQQLEVGLSRVRSRKDQVLMDQVDELRRRELTLHKDNEMLRRRLSDVQGMAESGRSTLIVNPWRQGNLLQTWQMYPCHFLDTKAAA

SEQ ID NO: 11966 - protein, 488 aa, Ralstonia eutropha JMP134
MIQTQLYIDGRWQSPLEGSTRDILSPADESVIAQAAEGTRADARIAIAAARRAFDGPWRQTTIRDRARLLNRIAALIDRDAEELARFESLNTGKTLTESRTDMGDIAATFRYFAGLVASESGAVNEAPHHVISRTLREPVGVCGLITPWNYPLLQAAWKIAPALGAGNTVIIKPSNLTPLTTHHFTKLIAELDLPAGVFNLVTGGAEVGAELAESRDVDLVSFTGGAFAGESIMKAATGNFKRIGLELGGKNPNIVFADADLDVAVDYALNAAFFHAGQVCSAGSRLMIEDSIYDAFVAKLAERLPRIAIGNGFHAETQMGPVQSAQQHEKILRMVQAGVAEGARLVYGGKRPEGDVYRKGYWLQPTLLADVTADMNIAKDEIFGPVVTAERFRSEDDALRAANDTPYGLAAAVWTRDLDKANRMSRALRFGTVWVNDYHPYFPEAPWGGYKASGIGRELARIGLDEYTELKHSYINLAPKAMGWFGA

SEQ ID NO: 11967 - protein, 418 aa, Burkholderia cepacia R1808
MPYQHIKVPEGGDKITVNKDFSLNVSDQPIIPYIEGDGTGFDITPVMIKVVDAAVAHTYKGKRKIHWMEIFAGEKATKVYGPDVWLPDETLQVLKEYVVSIKGPLTTPVGGGIRSLNVALRQELDLYVCLRPIQYFKGVPSPVREPQKIDMVIFRENSEDIYAGIEWAAGSEQAKKVIKFLQDEMGVKKIRFPETSGIGIKPVSTEGTERLVRKAIQYAIDNDRKSVTLVHKGNIMKFTEGLFRDAGYALAQKEFGGELIDGGPWMRVKNPKTGAEIVIKDSIADAFLQQILLRPAEYDVIATLNLNGDYVSDALAAQVGGIGIAPGANLSDSVAMFEATHGTAPKYAGKDYVNPGSEILSAEMMLRHLGWTEAADTIIAAMEKSILQKRVTYDFARLMEGATQVSCSGFGDVLIENM

SEQ ID NO: 11968 - protein, 402 aa, Medicago sativa
MDEAGSSSSLPPFLAKTYEMVDDRSSDPIVSWSASNKSFVVWNPPEFARVLLSEILKHNNFSSFIRQLNTYGFRKVDPEQWEFANDDFIRGQPHLMKNIHRRKPVHSHSLHNLQAQASLTESERQSMIDEIEKLKQDREQLLVETKRYQHDWERHEIQMHCSKDQLEKLEHKQQKMLSSVSEALQKPMIAVNLLPLAEAMERKRRLPARSVCFNNEASVEDAMETSVALPRENSEDNFYFDVKHREIGSTSRHPWHFGKTLAHEVGDNFVHTHSNMDLDESTCCADRLSISCQQLDGEVRPKSPEIDMNVEPAAAALEAVAVKEQPARITTAATGVNDVFWEQFLTEDPGASEAQEVQSERKDNSSRKNEGKPSDHGRFWWNMRKSNNHPEQMGHVSQVEKI

SEQ ID NO: 11969 - protein, 480 aa, Burkholderia cepacia R18194
MLPAAHIAGQPVRTHADAPGAPIFDASTGAAIGWQEFATAAHVDAAVRAARDAFAGWRDTPPAERGRILAKIAERVEASRDRLAALQMQVSGKPPFEAEADVGDVAATFAYYAKLCEDPALFAAEPVALPSDAVTAERFYDSVGVAALVMPWNFPMVTTAWKLAPALAAGCAVVLKPSELTSPTEHALLDIVAEAGVPAGVVNVVNGGAEVGAALTAHPLIDKISFTGSTAAGRKVMQAAAVDMKRVTLELGGKSSLIVRDDADLDVAVSLAVAGAFTNAGQMCSATARILVHDSVYRSFMAAFETAVRALVVAPPAAEQVAMGPLISAAQRTRVEAMLQQGIDAGARVAFSGRVADAGGDGFFMAPVVIAEPAADNPLWTDEVFGPVACVKSFRTDDEAIALANDTRYGLVATVVTRDAAIAKQFQQRVRAGLVWINAPQLIYPHVCWGGFGLSGIGRELGVAGLRSYQELRHAMHAID

SEQ ID NO: 11970 - protein, 188 aa, Brassica napus
  misc_feature (43)..(43): Xaa can be any naturally occurring amino acid
  misc_feature (155)..(155): Xaa can be any naturally occurring amino acid
  misc_feature (160)..(160): Xaa can be any naturally occurring amino acid
  misc_feature (174)..(174): Xaa can be any naturally occurring amino acid
STQRVRCERICGVLLIEELGLENEAEKPSNALLTRAWSPGWSXADKILTEFIEKQLIDYAKNSKKVVGNSTYLLSPYLHFGEISVRRVFQCARMKQIIWARDKNGQGVESAVLFLRGIGLRDYSRYICFNFPFTHEQSLLSHLRFFPWDADVEKXKAWRXGRTGYSEVDAGMRXELWATGLMHNRIRV

SEQ ID NO: 11971 - protein, 232 aa, Guillardia theta
MIQYALKSNASYHSRFKLKKRRRRIGKTDYKKRMKLIRQDKKKFENKKKRIIIRFSKRNLSLQMVNSNVDGDFILLSSYLKNLSKLEYKNLTNNYPFSYLLGYYFGKDLIEKVKQSETYNKKNYSSKITAIIDIGLKRATIGNKSFASMKGSVDSGINIPHNYNKIFKVKNNEIDSKELFNERSKGIHIIKYIDLLKNEDEEKLKKQFSNIFLSRDSLSTIKKNYLIKNKNK

SEQ ID NO: 11972 - protein, 375 aa, Rubrobacter xylanophilus DSM 9941
MSGGAAFAPGLEGVVATRTRLSMVDGAAGRLVIAGFPVEELAGRASFEETLYLLWNGVLPDAGRLEGLRGDLAARRALPEAAGEVLEAAVAGGAAPIDALRMAAGTLAPSGNDRDDALTSVAAFPTIVAACWRLSQGREPVEPDPGLSHAANYLYMLSGEVPGEERVRALETYLNTVSDHGMNASTFAARVISSTGSDLISAVVGAIGALKGPLHGGAPGPALDVVFEIGEPGRAEGVLRERLDRGERLMGFGHRVYKVRDPRADVLAGAAERLYASDADEELYRLALEVERTALRLLEEYKPGRNLDTNVEFYTALLLHGLGLPTGLFTPTFAVGRVAGWTAHCLEQRETGRLIRPQSEYVGPEARKWVPLEER

SEQ ID NO: 11973 - protein, 300 aa, Triticum aestivum
  misc_feature (40)..(40): Xaa can be any naturally occurring amino acid
  misc_feature (70)..(70): Xaa can be any naturally occurring amino acid
  misc_feature (109)..(109): Xaa can be any naturally occurring amino acid
MAMSDLAAAVISKPHGAVVGVSPAKIREVWADNLEAEFAXIRDVVDDYPYIAMDTEFPGIVCRPLGASPXSFRSNDEYNYATLKANVDMLSLIQLGLTLSDENGALPAXATGGRPCAWQFNFRGFDPRSDPANADSIDLLRNSGIDFDRFTTEGADTGHFAELLMSSGVLLNAELQWVTFHSGYDFGYLLKLLTGRNLPDTMPGFFDLIRIYFPVLYDIKHLMKYCGSLHGGLSKLGELLGVQRVGICHQAGSDSLLTLQCFQKLKEAYFRGSTENYAGVLYGLISDGGENRPPAALLIE

SEQ ID NO: 11974 - protein, 302 aa, Zea mays
MAGMSLQHPWAFAFGLLGNVISFMTFLAPIPTFYRIYKSKSTEGFQSVPYVVALFSAMLWIFYALIKSNETFLITINAAGCVIETIYVVMYFVYAPKKAKLFTAKIMVLLNGGVFGVILLLTLLLFKGSKRVVLLGWICVGFSVSVFVAPLSIMRRVIQTKSVEYMPFSLSLSLTLSAVVWFLYGLLIKDKYVALPNVLGFIFGVVQMVLYVFYMNKTPVAATAVGKDAGKLPSAADEHVLVNIAKLNPALPERTSGMHPVTQMAAVPARSCAAEAIAPAMLPNRDVVDVFVSRHSPAVHVV

SEQ ID NO: 11975 - protein, 112 aa, Bartonella sp. af116nev
ANEACLKMLQEIGFVKRIPEFIARAKDKNDPFRLMGFGHRVYKNYDPRAKIMQKTCHEVLKELNIQDDPLLDIAIELEKIALNDEYFVEKKLYPNVDFYSGITLKALGFPTE

SEQ ID NO: 11976 - protein, 137 aa, Phaseolus vulgaris
MAQKAQKNDTDFKVPEPITPCATATAAAATSISEPSRFFDAATPATSSRSPKRSLPLEDAANADRTVASEPKRAVNRCSGCRRRVGLTGFRCRCGDLFCAEHRYTDRHDCSYDYKTVGREAIARENPVVKAAKIVKV

SEQ ID NO: 11977 - protein, 112 aa, Bartonella sp. af107nev
ANEACLKMLQEIGSVERIPEFITRAKDKNDPFRLMGFGHRVYKNYDPRAKIMQKTCHEVLKELNIQDDPLLDIAIELEKIALNDEYFVEKKLYPNVDFYSGITLKALGFPTE

SEQ ID NO: 11978 - protein, 526 aa, Triticum aestivum
  misc_feature (346)..(346): Xaa can be any naturally occurring amino acid
MAMAMRRAAALGARHILAASASASSRVASRRHMGSVDAGAAMDKIRAAGLLRTRGLIGGQWVDAYDGKTTEVQNPATGEVLANVACMGNRETADAITSANTTFYTWSKLTASERSKALRKWHDLLMSHKEELALLMTLEQGKPMKEALGEVNYGASFIEFFAEEAKRVYGDIIPPTLADRRLLVLKQPIGVVGAITPWNFPLAMITRKVGPALACGCTVVVKPSEFTPLTALAAADLALQAGIPAGALNVVMGNAPEIGGELMQSTQVRKITFTGSTAVGKKLMAGSANTVKKVSLELGGNAPCIVFDDADIDVAVKGSLAAKFRNSGQTCVCANRILVQEGIYEXFASAFVKAVQSLQVGNGLEESTSQGPLINEAAVQKVEKFVGDATSKGANIMLGGKRHSLGMSFYEPTVVGNVSNDMLLFSEEVFGPVAPLIPFKTEEEAIHLANDTNAGLAAYMFTKNIARSWRVSEALEYGLVGVNEGLISTEVAPFGGVKQSGLGREGSKYGMDDYLEIKYVCMGNLG

SEQ ID NO: 11979 - protein, 262 aa, Hordeum vulgare
MSTAEATREENVYMAKLAEQAERYEEMVEFMEKVAKTADVGELTVEERNLLSVAYKNVIGARRASWRIISSIEQKEESRGNEAYVASIKEYRTRIETELSKICDGILKLLDSHLVPSATAAESKVFYLKMKGDYHRYLAEFKAGAERKEAAENTLVAYKSAQDIALADLPTTHPIRLGLALNFSVFYYEILNSPDRACNLAKQAFDEAIAELDSLGEESYKDSTLIMQLLRDNLTLWTSDNAEEGGDEIKEAASKPEGEGHS

SEQ ID NO: 11980 - protein, 514 aa, Zea mays
  misc_feature (407)..(407): Xaa can be any naturally occurring amino acid
MDGRRTILMGRYEIGKQLGQGTFAKVFYARNLTTGLAVAIKMINKDKVMKVGLMEQIKREISIMRLVKHPNILQLYEVMASKSKIYFVLEYAKGGELFNKIAKGGKLSEDVARKYFQQLVSAVDFCHSRGVYHRDLKPENLLLDENENLKVSDFGLSALAESKRQDGLLHTTCGTPAYVAPEVLSRKGYDGAKADVWSCGVILFVLVAGYLPFHDTNLIEMYRKISRAEFRCPRFFSTELKDLLHKILVPDPSTRISISRIKRSAWYRKPVEAHAKKNEAETSENTCTGEGTTSVSTECSTSEGNQGPLSLPNLNAFDIICLSTGFNLSGFFEDKYGRREERFTTRQPVTTVFTKLKELAKRLKLKVNKKENGTLKLAAPKEGKKGMLELDAEIFEVAPSLLLVELXKKTNGDTLEYQKLVKEEIRPALKDIVWVWQDDQHQCSQLPESLLSPPETQDELRLSLPQQEGQDFLEAPLPSLSLDQLKSPTAPEQAEQLPQPEQLQTPIAPEEQIN

SEQ ID NO: 11981 - protein, 124 aa, Glycine max
  misc_feature (49)..(49): Xaa can be any naturally occurring amino acid
MEPMDIVGKAKEDASLPKATMTKIIKEMLPPDVRVARDAQDLLIECCVXLGFGEYIEEVYAAYEQHKLESMQDSLKGAKWSNRAEMTEEEALAEQQRMFAEARARMNGGAIQSKEPEADQSLES

SEQ ID NO: 11982 - protein, 86 aa, Zea mays
KARPFCRRCAPGLNWPGRASGAVTLKKLECSKQAIALDTLAWDNIILPPLGVFFKFGCGVEFWICLILTFFGYLPGIIYAVWAITK

SEQ ID NO: 11983 - protein, 90 aa, Triticum aestivum
MASFARGAASLTRIGLSTSKTPLQLIHRRGLADHHGPPKVAYWKDPMSPSKWKEEHFVIVSLTGWGLLIYGGYKLATGGKGKKEEELAKA

SEQ ID NO: 11984 - protein, 423 aa, Bacillus sp. KSM-K16
MLEEKQLVESWEHEERWKGIIRPYEAADVMRLRGTLEIEYTIARRGAEKLWKLLHTEDFVPALGALTGNQAMQQVKAGLKAIYLSGWQVAADANLAGSMYPDQSLYPANSVPEVVKKINRTLQRADQISHMEGKEDIDWYAPIVADAEAGFGGQLNVFELMKSMIEAGAAGVHFEDQLSSEKKCGHLGGKVLLPTQTAVRNLIAARLAADVMGVPTILIARTDANAADLITSDVDSYDAPFLTGERTAEGFFKTKSGLDQAIARGLAYAPYADLIWCETSEPNIEEARRFAQAIHEKFPGKLLAYNCSPSFNWKAKLDDHTILNFQKQLGEMGYKFQFVTLAGFHALNHGMFELSRQYKDRGMAAYSDLQQAEFASEAHGYTATRHQREVGTSYFDEVAQVVTGGTSSTTALKGSTEAEQFQS

SEQ ID NO: 11985 - protein, 160 aa, Bacillus cereus ATCC 14579
MTVYDFSAKTITGEEKSLKDYKGKALLIVNVASKCGFTPQYKGLQEVYDKYKDQGLEILGFPCNQFGGQEPGTEADITSFCELNYGVNFPMFAKVDVKGDKAHPLYTYMTEQAPGLLGMKAVKWNFTKFLIGKDGKVVGRFAPQTKPVDLEVEIEKVLGE

SEQ ID NO: 11986 - protein, 481 aa, Pseudomonas aeruginosa UCBPP-PA14
MNGLPMNLIWFRCDLRTTDNSALLAAADGRPCVALYLLSPAQWREHDDAPCKVDFWLRNLGELQRQLAALNIPLLVRDCGHWRQAPEVIGRLCRELGIGAVHVNQEYGVNEERRDQAVGQRLREQGVAFHSHLDQLFFAPGSVLTRTGGYFQVFSQFRKVCHERLYQALPGVRPRPQPQPPHALASDPLPDAVPAFPRPADSLRRLWPAGEEVAQERLRGFADQHLADYHERRDFPALPGTSQLSPYLAAGVLSPRQCLDAALVANRGEFSGGQQGAATWINELLWREFYKHILVGYPRVSRHRPFREETEALRWRQAPAELEAWQQGRTGIPIIDAAMRQLLATGWMHNRLRMVVAMFLSKNLLIDWREGERWFMRHLIDGDLAANNGGWQWSASTGTDAVPYFRLFNPLSQSERFDPRGEFIRHWLPELAGLERKAIHDPSSLGLFAGVDYPRPMVDLKASRERALAAFRNLPPRDGRA

SEQ ID NO: 11987 - protein, 204 aa, Xylella fastidiosa Ann-1
MHLISNDFKNGQPIPVECAAGQTDGFAPNRNPHLAWDDVPENTRSFALLCIDPDVPSIPETIGRTDMEIPVTQPRIDFVHWVMSDISTDLRMIAHGSCSDGFVVGGKTMPPGPAGTHQGLNDYTKFFANTPEMAGDYYGYDGPYPPFNDLRIHRYLFRLFALDLEHLPLPKRFDGPTLLRTIQGHVLTEATLYGTYTLNPKAQK

SEQ ID NO: 11988 - protein, 353 aa, Nicotiana sylvestris
MEVISTNTNGSTIFKSGAIPMNGHQNGTSKHQNGHKNGTSEEQNGTISHDNGNELLGNSNCIKPGWFSEFSALWPGEAFSLKVEKLLFQGKSDYQDVMLFESATYGKVLTLDGAIQHTENGGFPYTEMIVHLPLGSIPNPKKVLIIGGGIGFTLFEMLRYPTIEKIDIVEIDDVVVDVSRKFFPYLAANFNDPRVTLVLGDGAAFVKAAQAEYYDAIIVDSSDPIGPAKDLFERPFFEAVAKALRPGGVVCTQAESIWLHMHIIKQIIANCRQVFKGSVNYAWTTVPTYPTGVIGYMLCSTEGPEIDFKNPVNPIDKETAQVKSKLAPLKFYNSDIHKAAFILPSFARSMIES

SEQ ID NO: 11989 - protein, 410 aa, Burkholderia cepacia R1808
MRSLSAPQAADILGVSISTLYAYVSRGLLRSLPDGASKRRRYDADEVRLLARRRADAKRAGGVAERSLDWGVPVLESRITQIADGRLYYRGIDALTLAHDATLEETAARLWDCAPARLAAASLASTGFDAAQWRDWARRWAHLAPLERTLVLLPAAAASLPGRWAPGCDAQLDTAALLLRVTAAALAGVAPRDAPVHRQLAAAWGIRRRADADLLRRALVLCADHELNPSTFAVRCIASTGTHLFGAIAGGLAALSGPRHGGETLRAGALLDEAAHAADLDRYLAQRLARDERSEGARTALAGFAHPLYPDGDPRARALLDALCTTQPERQPLRAAGALAARVEAATGLRPTIDFALAVLERTLALPAGAGFTLFAAGRTAGWIAHAIEQYADGKLIRPRARYVGSDAPG

SEQ ID NO: 11990 - protein, 274 aa, Oceanobacillus iheyensis HTE831
MEYVTLNNGLKMPQLGFGVWKVPNEEVVSPVEHALKVGYRSIDTAKVYGNEVGVGEAISNSGIPREQLFITTKVWNSDHGYDNTLKAFDESLERLGLDYVDLYLIHWPTPEFDQYVETYKALETLYKDGKVKAIGVCNFDIEYLERILNECEIVPVLNQVECHPYLQQKELRDFCEKHNIYLESYSPLMNGKEVLQSEELQNLAERKGKTVAQTILRWHLQSGMIVIPKSVTPNRIEENLDVFDFELTDTEMQEINELDRNLRSGAVPSEMNVR

SEQ ID NO: 11991 - protein, 319 aa, Nicotiana sylvestris
MEVISTNTNGSTIFKNGAIPMNGYQNGTSKHQNGHQNGTSEHRNGHQNGISEHQNGHQNGTSEHQNGHQNGTISHDNGNELQLLGSSNSIKPGWFSEFSALWPGEAFSLKVEKLLFQGKSDYQDVMLFESATYGKVLTLDGAIQHTENGGFPYTEMIVHLPLGSIPNPKKVLIIGGGIGFTLFEMLRYPTIEKIDIVEIDDVVVDVSRKFFPYLAANFSDPRVTLVLGDGAAFVKAAQAGYYDAIIVDSSDPIGPAKDLFERPFFEAVAKALRPGGVVCTQAESIWLHMHIIKQIIANCRQVFKGSVNYAWTTVPTYPT

SEQ ID NO: 11992 - protein, 121 aa, Zea mays
VERIRPAMGSDIDVSLDCAGFSKTMSTVLEATRPGGKVCLVGMGHNEMTLPLTAAAAREVDVVGVFRYKDTWPLCIDFLRSGKVDVKPLITHRFGFSQRDVEEAFEVSARGRDAIKVMFNL

SEQ ID NO: 11993 - protein, 430 aa, Nicotiana sylvestris
MEVISTNTNGSTIFKNGAIPMNGHQSGTSKHLNGYQNGTSKHQNGHHNGTSEHRNGHQNGISEHQNGHQNGTSEHRNGHQNGTSEHRNGHQNGISEHQNGHQNGTSEHQNGHQNGTSEQQNGTISHDNGNELLGNSNSIKLGWFSEFSALWPGEAFSLKVEKLLFQGKSDYQDVMLFESATYGKVLTLDGAIQHTENGGFPYTEMIVHLPLGSIPNPKKVLIIGGGIGFTLFEMLRYPTIEKIDIVEIDDVVVDVSRKFFPYLAANFNDPRVTLVLGDGAAFVKAAQAGYYDAIIVDSSDPIGPAKDLFERPFFEAVAKALRPGGVVCTQAESIWLHMHIIKQIIANCRQVFKGSVNYAWTTVPTYPTGVIGYMLCSTEGPEVDFKNPINPIDKETTQVKSKLAPLKFYNSDIHKAAFILPSFARSMIES

SEQ ID NO: 11994 - protein, 69 aa, Triticum aestivum
  misc_feature (4)..(4): Xaa can be any naturally occurring amino acid
  misc_feature (6)..(6): Xaa can be any naturally occurring amino acid
  misc_feature (8)..(8): Xaa can be any naturally occurring amino acid
  misc_feature (13)..(13): Xaa can be any naturally occurring amino acid
  misc_feature (17)..(18): Xaa can be any naturally occurring amino acid
  misc_feature (22)..(22): Xaa can be any naturally occurring amino acid
  misc_feature (28)..(29): Xaa can be any naturally occurring amino acid
  misc_feature (58)..(58): Xaa can be any naturally occurring amino acid
  misc_feature (61)..(61): Xaa can be any naturally occurring amino acid
  misc_feature (67)..(67): Xaa can be any naturally occurring amino acid
KHGXAXCXFVAIXIFNXXKLEXIVPSSXXCDVPHVDRQDYQLIDITDDGYVSLLPQSXHPXHHLQLXHH

SEQ ID NO: 11995 - protein, 371 aa, Archaeoglobus fulgidus DSM 4304
MAIYAFPEFDGESRRASRIYASARYPSRQEGNVFFDSEEVPNLKYADEMPLKIRNFYSVVAFRPSHIFLSRDVLGGRPLYYGSDMSISSFKSYIDGEVYEVMPGEVVKMDYTGEILERRKYAFEDVFRVGREDVNEMADRILNSLSSYKPRVGCIAFSGGVDSSLLAALYDAPLVSVTASDAEEEWLKTAARMLGKEIEILKVGESAIREVVDTVRKTIETGDFLQLSIAVPVYLTMQFAKSLGFTEIIFGQGADELFGGYKRYEGLSEHELEDALVKDLKSIGESNLVRDCKLAYKNEIKLVTPYLCWDVIDAALKIPPEYKVRREGGKVVRKYILRKIAEKFLPEEIAWRDKKAIQYSTGIAKILKKCL

SEQ ID NO: 11996 - protein, 426 aa, Psychrobacter sp. 273-4
MADNQATLTVDGKDYQLPITEGTLGPSVIDVAAFQKAGYWTYDPGFMATAPVESKITFIDGGKGELLHRGYPIDQLANNAEYLEVAYALIHGDLPNAEQKADFYEKIRKHMGVHDQLRKFFEGFRRDAHPMAIMVGVVGALSAFYHENLDISNEEHREITAIRLIAKMPTLAAMSYKYSKGEPFMYPRNDFNYAENFLYMMFATPADVNYKTNDVITRAMDKIFTLHADHEQNASTSTVRLAGSTGANPYACIAAGIAALWGPSHGGANEAVLEMLDEIGSVENVPEFMEKVKSREVKLMGFGHRVYKNFDPRAQVMKETCDEVLGALGINDPKLELAMALEKIALEDPFFVERNLYPNVDFYSGIILKAIGIPTSMFTVIFSLARTSGWISHWLEMHSTPFKIGRPRQLYTGETHRDFVKVEDRK

SEQ ID NO: 11997 - protein, 194 aa, Triticum aestivum
  misc_feature (94)..(94): Xaa can be any naturally occurring amino acid
  misc_feature (125)..(125): Xaa can be any naturally occurring amino acid
  misc_feature (130)..(130): Xaa can be any naturally occurring amino acid
  misc_feature (144)..(144): Xaa can be any naturally occurring amino acid
  misc_feature (149)..(149): Xaa can be any naturally occurring amino acid
EISRHSSVESIDICEIDQLVIDICKEFFPHLSVGFEDPRVQLHVGDAVEFLRNAPEGTYDAIIVDSSDPIGPAQELVEKPFFETIARALRPGGXLCNQAESMWLHTHLIQDMLSICRETFKGSVXYAWVXPTYPSGVIGSVCAXMATGXFLTPVIIESERLTGRNRLYQNHMHVVFALQRELSHERQREYARHK

SEQ ID NO: 11998 - protein, 506 aa, Lotus corniculatus var. japonicus
MAAAFTCSAADLHPLLGTGANATAAAEFICSRFGAISNKFTDTAYAVDNTYLLFSAYLVFAMQLGFAMLCAGSVRAKNTMNIMLTNVLDAATGGIFFYIFGFALAFGTPSNGFIGKHFFGLNEFPSPSFDYGFFLYQWAFAIAAAGITSGSIAERTQFVAYLIYSSFLTGLVYPIVAHWFWSSDGWGSPARTENLLFGSGVIDFAGSGVVHLVGAVAGFWGAFIEGPRMGRFDHAGKPVPLRGHSGTLVVLGTFLLWFGWYGFNPGSFITILKSYGESGSGNYYGQWSAIGRTAVTTTLAGCSAALTTLFGKRLQTGHWNVTDVCNGLLGGFAAITSGCSVVDPWAAIICGFVAAWVLIGCNVLAEKFHYDDPLEAAQLHGGCGTWGIIFTALFAKKQYVNEVYAGLPDRPYGLLMGGGWRLLAAHVVQILTIAGWVSVTMGAVFFVLHKLNLLRISPEEEMAGLDMTSHGGLAYEYHEDVGSVQKALKFVFDFYCKGNYYKTLLE

SEQ ID NO: 11999 - protein, 262 aa, Triticum aestivum
  misc_feature (153)..(153): Xaa can be any naturally occurring amino acid
  misc_feature (162)..(162): Xaa can be any naturally occurring amino acid
  misc_feature (197)..(197): Xaa can be any naturally occurring amino acid
MGSTAADMAASADEEACMYALQLVSSSILPMTLKNAIELGLLETLVAAGGKLLTPAEVAAKLPSTANPAAADMVDRMLRLLASYNVVSCTMEEGKDGRLSRRYSAAPVCKFLTPNEDGVSMAALALMNQDKVVIETWYYVKDTVPFDCIAFNXAFGMLVFEXHNTHSLIIRVYIEEMNKHFNIIGKKLLEVCKVVEXLGTIVAAYPAIKGINFDLPHVISEAPPFPGVTHVGGDMFQKVPSGDAILMKWILHDWSDEHCATV

SEQ ID NO: 12000 - protein, 219 aa, Triticum aestivum
QVCTKKQAGTGPEFPGYRRPTRAPTTRSAPEFRARSISADAAPSTRTGNLAMAAASSATSVHDFTVKDASGKDVDLSVYKGKVLLIVNVASQCGLTNSNYTELSQLYPKYKDQGFEILAFPCNQFGGQEPGTNGRIVQFACTRFKAEYPIFDKVDVNGSNVSPLYKFLKSSKGGLFGDSIKWNFSKFLVDKEGHVVDRYAPTTSPLSIEKDIKKLLGSS

SEQ ID NO: 12001 - protein, 122 aa, Triticum aestivum
  misc_feature (40)..(40): Xaa can be any naturally occurring amino acid
  misc_feature (117)..(117): Xaa can be any naturally occurring amino acid
MAPTVMASSATSVAPFQGLKSTAGLPVSRRSNGASSAASXNGGRIRCMQVWPIEGIKKFETLSYLPPLSTEALLKQVDYLIRSKWVPCLEFSKVGFIFREHNASPGYYDGRYWTMWXLPMFG

SEQ ID NO: 12002 - protein, 216 aa, Triticum aestivum
MSPLACGFEADRSRRRAMPDSDNEDSGNAGGELSSPREQDRFLPIANVSRIMKKALPANAKISKDAKETVQECVSEFISFITGEASDKCQREKRKTINGDDLLWAMTTLGFEDYVDPLKHYLHKFREIEGERAAATSTSTTPDMPRNNNNATGYADAPGGMMMMGQPVYGSPPPPQQQQQHQHQIAMGGRAGFPYHGGGGGGGGSSSSSGFGRKEG

SEQ ID NO: 12003 - protein, 356 aa, Zea mays
  misc_feature (31)..(31): Xaa can be any naturally occurring amino acid
  misc_feature (54)..(54): Xaa can be any naturally occurring amino acid
  misc_feature (274)..(274): Xaa can be any naturally occurring amino acid
PQRKLDCIKRLGFGLLNKVSMLFPHVFWSTXLDTFGHLVENPRRRGEFFLTSSXAAVAGGPLLMALVAGEAAHNFETMPPTDAVSSALQILRGIYEPQGIEVPDPLQSVCTRWGTDSFSLGSYSHVAVGASGDDYDALAESVGDGRLFFAGEATTRRYPATMHGAFISGLREAANITLHANARATKSKVDRSPSTNTQACAATLTDLFRQPDLEFGSFSVIFGGKASDPKSPAILKVELGASRKKNTAEGVKTEQNHSNKLLFQQLQSHFNQQXQLYVYTLLSRQQAMELREVRGGDDMRLHYLCEKLGVKLVGRKGLGPGADAVIASIKAERNRSRTRPGPSKLKKSLKPNVAAS

SEQ ID NO: 12004 - protein, 102 aa, Brassica napus
SGRVGSVYERKASIREFYAVIFPSLLQLQRGITDLEDRKQKEVCSMRYRKKDEGKKCELSEIEMEREEECGICMEMNSLVVLPNCTHSLCIKCYRDWRGRSQ

SEQ ID NO: 12005 - protein, 179 aa, Glycine max
  misc_feature (114)..(114): Xaa can be any naturally occurring amino acid
MASSMISSPAVTTVNRAGAGMVAPFTGLKSMAGFPTRKTNNDITSIASNGGRVLCMQVWPPIGKKKFETLSYLPDLDDAQLAKEVEYLLRKGWIPCLEFELEHGFVYREHYRSXLEYYDGRYWTMWKLPMFGCTDASQVLKELQEAKTAYPNGFIRIIGFDNVRQVQCISFIAYKPPGF

SEQ ID NO: 12006 - protein, 289 aa, Zea mays
MGGGRVMATAAKVAGIGVAKGGFRGGFGVPAAANDQFIVRNTSASKPVSASISSAVHPSVEEDAVVMRKPVWEDEWEFAEVETKTIPRVVFDKPPSLQEAKEATDDLKDALNMACMEGSNEVGSVSRMFSSFQPSENRAVESAVPQVALKAFAFLSENTAAQSVVTSIASDPKVWDAVMENKDLMKFLETNTASTKDEADNDDKSELSSETESEEDSEEKPIQLMEILRDMKLKAVQMMENVSSYFGGLFRTETFTEGGQERKRMLLNDPTTLFGLAVCVIFMVVLKRA

SEQ ID NO: 12007 - protein, 395 aa, Methanosarcina barkeri str. fusaro
MNEQGLSEKEIFSYLEDVKSEDTDYYRVLSSMCTHPHRIAVEAHRLFIEANLGDLGLFAGAHRLEKEVIRMLGELLHAQSVEIPSGEACESSVCGYLTTGGTESNIQAIRGMKNLVTEDGKKSGEILNIVVPESAHFSFDKVANMMGIEVKRASLDPEFRVDIASAESLIDANTIGLVGIAGNTEFGQVDPIEELSKLALENELFLHVDAAFGGFVIPFLEKPYSFDFKVPGVTSIAIDPHKMGLSTIPSGALLFRSPFFMDSLKVNTPYLTTKSQFTLTGTRSGASAAATYAVMKYLGREGYRKNVQYCMQLTTKLVKEARKFGFEPLIEPVMNVVDLRVPNPDIVREQLLKKFGWNVSITRNPRSLRLVLMPHNTARDIEEFLQDLRKVTTEL

SEQ ID NO: 12008 - protein, 220 aa, Bacillus cereus ATCC 14579
MNLKQLAGEYAANFVNDGMKIGLGTGSTVYWTIQKLGERVKEGLSFQAVPTSKETEALAQQLNIPLISLNDVQSLDLTIDGADEIDSNLQLIKGGGGALLREKIVASSSKKLIIIADESKLVTHLGTFPLPIEIIPFSWKQTENKIQSLGCQTTLRLKNNETYITDNNNMIIDCIFPNHISNPVHLHTQLKMITGVVETGLFISMTSTAIIGTKNGIKKL

SEQ ID NO: 12009 - protein, 273 aa, Arabidopsis thaliana
MYICTNVHLSPLSLHHLACEFINSCEMEPRINDLQVESRVHELLDFPVHTNQISSAIYEILLQCPNDHIENPKKKPYNCPHSGAKCDVTGDIQRLLLHLRNDHNVEMSDGRSFSHRYVHHDPKHLHHATWMLTVSYITDYLALFLQLCEFLSFNPLETMQLLDCCGRKFCLYFEAFHLRKTPMYMAFMQFMGDEEEAMSFSYSLQVGGNGRKLTWQGVPRSIRDSHKTVRDSQDGLIITRKLALFFSTDNNTTDKELKLKVSGRVWREQPVSI

SEQ ID NO: 12010 - protein, 174 aa, Triticum aestivum
  misc_feature (92)..(92): Xaa can be any naturally occurring amino acid
  misc_feature (97)..(97): Xaa can be any naturally occurring amino acid
  misc_feature (124)..(124): Xaa can be any naturally occurring amino acid
  misc_feature (135)..(135): Xaa can be any naturally occurring amino acid
  misc_feature (145)..(145): Xaa can be any naturally occurring amino acid
  misc_feature (164)..(164): Xaa can be any naturally occurring amino acid
  misc_feature (169)..(169): Xaa can be any naturally occurring amino acid
DAIGVTPLYIGWGIDGSVWISSEVKGLNDDCEHFEIFPPGHLYSSKQGGFKRWYNPPWFSEVIPSVPYDPLALRKAFEKAVIKRLMTDVPFXVLLSXGLDSSLVAAVTVRHLAGTKAAKRWGTXLHSFCVGLEGXPDLKAAKEVXNYLGTMPMSSPSCSDGIDXIEDVXYHPNI

SEQ ID NO: 12011 - protein, 122 aa, Oryza sativa
IMRILKDYNQYVMRNLARGYSRKDLGVAYVKEKQLQVNMKINKLRETVKAHQEKLQTVAKTAGINHEEWLANADRWVAGFLEKFEEHCHNMETAIKGRIQEKLRRQTSRGIIGGLMQQPVAA

SEQ ID NO: 12012 - protein, 319 aa, Agrobacterium tumefaciens str. C58
MRTIYRYDICLRLKPIAPTPVKERLLPLTGLFRRPCFQQTGETPMYDVSANGANIPALGFGTFRIPEDDVRRILPEALKLGFRHVDTAQIYKNEGAVGEVIAQSGISRHDIFLTTKVWVDRYRHDDFLASVDESLAKLKTDYFDLLLLHWPKSDVPLAERMGALNAVRKAGKARNIGISNFNVALTEEAVKLSDTPLATNQIEYHPYLDQTKVISAARKHGMSVTAYYLMADGKVPNDPVLKDIGAKHGKTAAQVTLRWAVQQPDIVALSKTATESRLKENFDIFDFALSEEEMQAIHALAKPNGRIVSPGHLAPDWDD

SEQ ID NO: 12013 - protein, 112 aa, Bartonella sp. af108nev
ANEACLKMLQEIGSVKRIPEFIARAKDKNDPFRLMGFGHRVYKNYDPRAKIMQKTCHKVLKELNIQDDPLLDIAIELEKIALNDEYFVEKKLYPNVDFYSGITLKALGFPTE

SEQ ID NO: 12014 - protein, 50 aa, Enterococcus faecalis
KGFGFISPEDGNDVFVHFSAIQGDGFKTLEEGQAVTFDVEDGHRGPQAAN

SEQ ID NO: 12015 - protein, 193 aa, Triticum aestivum
DASCLDRPLLPSPRAPPSPSSSSIPMQQRRGRPSGTDGSDFSYRMVVDSRYQRVADGRSRLARLMLVQTLHQVAGGALLLLSLSKGTEINKFAVLSLAAGLLAILLGEFGRRRTVAVFLRLYTSLSSIAIAFSVTCIIRSDLFVKITKQNTADITSYEMFDVVRVALGVLLQLVVIATTTRLLQNMSPPKRTS

SEQ ID NO: 12016 - protein, 50 aa, Pediococcus pentosaceus
KGFGFITREDGSDVFVHFSAIQSDGFKTLEEGQSVSFDVEESDRGPQAAN

SEQ ID NO: 12017 - protein, 363 aa, Escherichia coli O6
MSKNYHIAVLPGDGIGPEVMTQALKVLDAVRNRFAMRITTSHYDVGGAAIDNHGQPLPPATVEGCEQADAVLFGSVGGPKWEHLPPDQQPERGALLPLRKHFKLFSNLRPAKLYQGLEAFCPLRADIAANGFDILCVRELTGGIYFGQPKGREGSGQYEKAFDTEVYHRFEIERIARIAFESARKRRHKVTSIDKANVLQSSILWREIVNEIATEYPDVELTHMYIDNATMQLIKDPSQFDVLLCSNLFGDILSDECAMITGSMGMLPSASLNEQGFGLYEPAGGSAPDIAGKNIANPIAQILSLALLLRYSLDADDAASAIERAINRALEEGIRTGDLARGAAAVSTDEMGDIIARYVAEGV

SEQ ID NO: 12018 - protein, 439 aa, Zea mays
MTPFHFSTSPAAHFSVSARECGEKGGNSPLSGRRIPPFLFGARTRTPHAAQCTPPFPPPCCCESATTGGKIFSFTFLPFPPAHARALIDAMGDAAASTSAPTTPTSILICLEDGSDLLADADDGAGTDLVVARDERLLVVDQDEEYVALLLSKESASGGGGPVEEMEDWMKAARSGCVRWIIKTTAMFRFGGKTAYVAVNYLDRFLAQRRVNREHAWGLQLLMVACMSLATKLEEHHAPRLSEFPLDACEFAFDRASVLRMELLVLGTLEWRMVAVTPFPYISCFAARFRQDERRAVLVRAVECVFAAIRAMSSVEYQPSTIAVASILVARGRETPAGNLDALKAILGSSFPQLDTGHVYSCYSAMIREDDKSPTQSTSTSTGVASSGVSVAAHAGGSGSPSPPGASVSVGANNAAGTAPPATTDNRNKRRRLRSPQRQ

SEQ ID NO: 12019 - protein, 140 aa, Pirellula sp. 1
MTMSDEATAVAEYSAEAKELGDKIANMTLKQAKELSDYLKDEHGIEPAAGGGAVMMAGPAGDGGGAAEVEQTEFDVVLTGFGEKKLNVVKVVKNITGASLMDAKKMVEGCPATLKEAVSKEDAEKVKAEIEEAGGSVELK

SEQ ID NO: 12020 - protein, 173 aa, Oryza sativa (japonica cultivar-group)
MAGVGRNMLAPLLVLNLIMYLIVIGFASWNLNHFINGQTNYPGVAGNGATFYFLVFAILAGVVGAASKLAGVHHVRAWRHDSLATNAASSLIAWAITALAFGLACKEIHIGGHRGWRLRVLEAFVIILAFTQLLYVLMLHTGLFGGGDGAYRDHDYGVGAGAAAGEPKGTARV

SEQ ID NO: 12021 - protein, 229 aa, Brassica napus
  misc_feature (221)..(221): Xaa can be any naturally occurring amino acid
MALENQSAARFTGKVNWFNDSKGFGFITPDDGTTEELFVHQSSIVSEGYRSLAIDDLVEFEIAQGTDGKTKAVEVTAPGGAPLKKKEASSRGRSGRGGGCYNCGEAGHLAKDCRDGGERGACYTCGDTGHLARDCVQKPSGERGGGRGGGGGCYQCGDTGHLARDCDNIGGGGRSSGGCYECGGAGHMARDCEKRGSGGGGGRSSGGGGGGKCYKCGEGGXFARECSVA

SEQ ID NO: 12022 - protein, 509 aa, Triticum aestivum
MASFARQEHQFLAELGLAPRNPGSFACGAWGGSGPVVTTTNPSNNEVIAEVVEASMDDYEKGMSACFDAAKTWMAIPAPKRGEIVRQIGDALRAKLHHLGRLLSLEMGKILPEGIGEVQEIIDMCDYAVGLSRQLNGSIIPSERPNHMMMEVWNPLGVVGVITAFNFPCAVLGWNACIALVCGNCVVWKGAPTTPLITIAMTKIVASVFEKNNLPSAIFTAFCGGAEIGQAIALDTRIPLVSFTGSTKVGQMVQQQVSARFGKCLLELSGNNAIIVMDDADIPLAVRSVLFAAVGTAGQRCTTCRRLLLHESIYQTFLDQLVEVYKQVRIGDPMEKGTLLGPLHTTASKESFLKGIQNIRSQGGKILLGGSAIESEGNFVQPTIVEISPSAPVVREELFGPVLYAMKFQTLKEAIEINNSVPQGLSSSIFTRKPDAIFKWIGPHGSDCGIVNVNIPTNGAEIGGAFGGEKATGGGREAGSDSWKQYMRRATCTINYGSELPLAQGINFG

SEQ ID NO: 12023 - protein, 408 aa, Picrophilus torridus DSM 9790
MIYAGNFYYKDHFEYLEIDVNNGIITSIKKNIPGKKIKLNGAVMPAGTDSHVHFRDPGETYKEDFSTGTMSAIFGGTTTIIDMPNNKIRIDNYQAFSDKLAIVSRKAYCDFGLYSMFTGDNSLIIDKRSTGIKIYMGNTTNTNGSDITNEEISKIKDLNVPVFFHAEDSECLKKHYFNAKNLKEYDKSRPVECEILSVEKIKNYDLNTKVIAHKTFIDKIEMLSEASPHHLLLNNDMDLGSYGKVNPPLRSRSAQSLLLNSYISGNFDILSSDHAPHSQNEKTDFEYALPGIIGVETRIPLMLALVSKKILPIDVFYKTAIYNPAKLFKIRKGVIDNGYYADFFSFDYHNIERLNDYKLHSKNPVSPFNGFDVIFPDSVVLRGDVIIDNREILDERSGKFINELNQSA

SEQ ID NO: 12024 - protein, 344 aa, Escherichia coli
TPDCYQAADWRHRGYHAVELPGGDDYPQSRSGAGSRLHHGAEARQSDAVLCLALAELAIRAGVPAGVFNVVTGSAGAVGNELTSNPLVRKLSFTGSTEIGRQLMEQCAKDIKKVSLELGGNAPFIVFDDADLDKAVEGALASKFRNAGQTCVCANRLYVQDGVYDRFAEKLQQAVSKLHIGDGLDNGVTIGPLIDEKAVAKVEEHIADALEKGARVVCGGKAHERGGNFFQPTILVDVPANAKVSKEETFGPLAPLFRFKDEADVIAQANDTEFGLAAYFYARDLSRVFRVGEALEYGIVGINTGIISNEVAPFGGIKASGLGREGSKYGIEDYLEIKYMCIGL

SEQ ID NO: 12025 - protein, 197 aa, Brassica napus
  misc_feature (143)..(143): Xaa can be any naturally occurring amino acid
MCGILAVLGCTDDSQAKRVRVLELSRRLRHRGPDWSGIYQHGDNYLAHERLAIVDPDSGDQPLFNEDKTIVVTVNGEIYNHEELRKDLKNHKFRTGSDCDVISHLYEEHGENFVDMLDGVFSFVLLDTRDNSFMVARDAIGVXSLYIGWGLDGSVWISSEMKGLHEDCEHFEVFPPGVLYSSKSGGFKQWYNPPWYN

SEQ ID NO: 12026 - protein, 372 aa, Zea mays
PRVRSKTKIYIVMELVTGGELFDKIASRGRLKEDDARKYFQQLINAVDYCHSRGVYHRDLKPENLLLDASGTLKVSDFGLSALSQQVREDGLLHTTCGTPNYVAPEVINNKGYDGAKADLWSCGVILFVLMAGYLPFEDSNLMSLYKKIFKADFSCPSWFSTSAKKLIKKILEPNANNRITIAELINNEWFKKGYQPPRFETADVNLDDVNSIFDESGEPAQLVVERREERPSVMNAFELISTSQGLNLGTLFEKQTGSVKRETRFASRLPANEILSKIEAAAGPMGFNVQKRNYKLKLQGENPGRKGQLAIATEVFEVTPSLYMVELRKSNGDTLEFHKFYHNISNGLKDVMWKPESGIVEGDEARQRRSP

SEQ ID NO: 12027 - protein, 486 aa, Bordetella parapertussis 12822
MEDLRNHEFKNYIGGQWVACAAGKTYPNVNPADTDDIVGRFQASQAEDAAAAVAAAQAAFDGWRNLAVSKRAALMQRAADYLEAHAEQFGRELTREEGKALNLAKDEVLRSAQTIRFYAAEGQSFSGETFVNDDPDMVVYSQREPLGVVTVISPWNFPVSIPARKIAPALITGNTVVFKPSSDAPLSGLRLVEAFEQAGLPPGVLNLVTGSASAIGAAITQAPQVRAVSFTGSTAAGEQIHRSVDMTTRTQMELGGKNPLIVMADADLDRAVDLVVKGGFSLSGQACTGTSRVLVDAPVKAAFTEKLLAKVKALKVGNSLEGSFDLGPLATARQLESVMRYIEVGKQEARLLYGGERLDGPGYERGYYLTPAVFADVTQQMRIAREEIFGPVIALIEVNGYEDAIAKANDTEYGLAAAIATTNAQYAHRFARDIQAGTVKINRTTTGNLINAPFGGLKRSSTSTFRESGRIGLEFYTQIKTVYRAG

SEQ ID NO: 12028 - protein, 333 aa, Magnaporthe grisea 70-15
MASRAPIRRVDPELGLIWEGAPNMDTLSDVPAVRDAFASHYPDIFGLPHLPVSTQRPSHNVKSADGTQIKVMHFIPDAPAGIDAPPARAVIFCFGGGFIMGKADSNIDFAANMAIQTHSHVFMPNYRLAPEHPAPAAVEDVYATLRWVQTHAAGLGINAERVVLFGVSAGGGIATGTALMAYDKSLTSSEKLPLPAGLALRYPMLDDRTFGSIEDPEHFYHVWNCVVNKIAWTAYAGGKARAERTNDTISVYAAPARAGPDKLRGLPPTFVDVGGLDLFREEITKFVTALATAGVNVEFHHYSGLPHGVEIMAPGISKAIAMNKNTCRFIGRF

SEQ ID NO: 12029 - protein, 243 aa, Zea mays
MFGYRKADPDLEAGGSSLLYPGMTESPELRWAFVRKIYVILTVQLAMTAAVSAFVVKVPAVSNFFVSSNAGIALYIFLIVLPFIVLCPLHYYHQKHPVNLLLLGLFTVAISFAVGMTCAFTSGKIILEAAILTAVVVNSLTAYTFWAAKRGHDFNFLGPFLIAAIMVLMVFSLIQIFFPLGKISVMIYGGLASLIFCGYIIYDTDNIIKRHTYDQYIWAAVSLYLDVINLFLSLLQLLRAADS

SEQ ID NO: 12030 - protein, 158 aa, Glycine max
  misc_feature (46)..(46): Xaa can be any naturally occurring amino acid
  misc_feature (92)..(92): Xaa can be any naturally occurring amino acid
  misc_feature (108)..(108): Xaa can be any naturally occurring amino acid
FLILISKQRLPHDHFPTVTTVNRAGAGLDAPLTGLKSMAGFPTRKXTNNDITSLASNGGRLQCMRGWPPGGKNNLETLSYLPDLDDAQLPKXVEYLLRKGWIPCLEFXLEHGFESREHTRKPGYYHGRYWTMWKLPMFGCTDAPEVLKELQEANTAYP

SEQ ID NO: 12031 - protein, 196 aa, Fucus distichus
MQNIKCVVVGDGAVGKTCLLISYTTNAFPGEYIPTVFDNYSANVMVDGKPINLGLWDTAGQEDYDRLRPLSYPQTDVFLVCFSVVDPTSFHNVKLKWIPELQHHAPGIPFILVGTKLDLRDDQDAIKRLAERRQTPISFSEAQGLSSDLEAYRYLECSALTQHGLKQVFDGAIRCVLEQNQRKMKKKKGKKGCVIS

SEQ ID NO: 12032 - protein, 131 aa, Hordeum vulgare subsp. vulgare
PNLLELEAPIKICGDIHGQYSDLLRLFEYGGFPPEANYLFLGDYVDRGKQSLETICLLLAYKIKYPENFFLLRGNHECASINRIYGFYDECKRRFNVRLWKVFTDCFNCLPVAALIDDKILCMHGGLSPDL

SEQ ID NO: 12033 - protein, 356 aa, Cordyceps bassiana
MSRANPPNNASASRKISFNVSEQYDIQDVVGEGAYGVVCSAIHKPSGQKVAIKKITPFDHSMFCLRTLREMKLLRYFDHENIISILDIQKPRGFDSFNEVYLIQELMETDMHRVIRTQVLSDDHCQYFIYQTLRALKAMHSANVLHRDLKPSNLLLNANCDLKVCDFGLARSAASQEDNSGFMTEYVATRWYRAPEIMLTFKEYTKAIDVWSVGCILAEMLSGKPLFPGKDYHHQLTLILDVLGTPTMEDYYGIKSRRAREYIRSLPFKKKVLFRTLFADTSDLALDLLEKLLAFNPVKRITVEEALKHPYLEPYHDPEDEPTAPPIPEEFFDFDKHKDNLSKEQLKQLIYQEIMR

SEQ ID NO: 12034 - protein, 50 aa, Bifidobacterium animalis
KGFGFITGEDGQDVFVHFSAINGEGYKSLDKGQAVSYNVKQSDRGPQAAN

SEQ ID NO: 12035 - protein, 438 aa, Zea mays
MAEKENILMQRYEMGKLLGKGSFAKVYHARNVKTSESVAIKVIDKDKIKKCGLMDQIIQEISVMKLVKHPNIVQLYEVMATKTKIYFVIEYVKGGELFKKVQRGRLKEDVARTYFQQLISAVDFCHTRQVYHRDLKPENLLLDGSHNLKISDFGLSALPNCKRKDGLLHTICGTPAYVAPEVISQKGYDGAKADIWACGVILYVLLAGYLPFQDKNMMDMYKKICKAELKWPSWFSSDVRKLLRRILHPNPNRRISIEEIRTHPWFRIGLDARLFDSTTRDYVPSDMDLALNSLNSNMVECNSAAEKLTILNAFDIISLSNGFDLSGIFENSNKESKFMSTNTAMTIITKLMEVAKSLDLKVITKTGGLLNMEAAKSGIKGVMSINAEIFQITPNYHLVEIKKINGDILEYHNFMNQSMRPALEDIVWAWHGEQPDEK

SEQ ID NO: 12036 - protein, 169 aa, Triticum aestivum
  misc_feature (54)..(54): Xaa can be any naturally occurring amino acid
  misc_feature (70)..(70): Xaa can be any naturally occurring amino acid
  misc_feature (79)..(79): Xaa can be any naturally occurring amino acid
  misc_feature (97)..(97): Xaa can be any naturally occurring amino acid
  misc_feature (100)..(100): Xaa can be any naturally occurring amino acid
  misc_feature (149)..(149): Xaa can be any naturally occurring amino acid
MAPTVMASSATSVAPFQGLKSTAGLPVSRRSNGASLGSVSNGGRIRCMQVWPIXEGIKKFETLSYLPPLXTEALLKQVXYLDPSKWVPCLRFSKLGXLPXEHNASPGYYDGRYWAMWNCLCSGCTDATQVINEGGGVKKDTLTLFRIIXSTNLKCMRSYPLNNCKIPEG

SEQ ID NO: 12037 - protein, 501 aa, Oryza sativa (japonica cultivar-group)
METRELWVLAAALAVSLLYYLAALMRYAGGGCSRSSRPPLPPGPTPLPLIGNLLSLRGVLHHRLASLARVHGPVMALRLGLTTAVVVSSRDAAAEAFTKHDRRLAARVVPDSNRAHGFSDRSIIWLPSSDPRWKALRGIQATHLFSPRGLAAVRSVRESKVRDIVAYFRSRAGEEVVFGEAIYSGVLNLVSSSFFSVNMAGVGSEEAHGLRELVEDLVEAIAKPNVSDLFPFLRQLDLQGLRRRTEERMARAFGILDGIIDRRLANRTHGDRHGDFLDALLDLVSEGKMARDHVTIMLFEVFGAGSDTMSVSLEWAMAELLRNPRAMRKARAELEDAAAVVEESDAARLPYLQAVVKEAMRLHPVGPILLPHRAVEDGVEIGGYAVPRGAMVIFNAWAIMRDPAAWERPDEFVPERFMETTTAIDFRGKEYEYLPFGSGRRLCPGLPLAERVVPFVLASLLRAFEWRLPDGVSAEDLDVSERFNTANVLAVPLKVVPVIVN

SEQ ID NO: 12038 - protein, 429 aa, Agrobacterium tumefaciens str. C58
MTEKSATVTLGEKQVELPVREGTIGPSVVDIATLYKHTGSFTYDPGFTSTASCESKITYIDGDEGVLLHRGFPIEQLAEQGDFLETCYLLLYGELPTAAQKKDFDTRVTRHTMVHEQMSRFFTGYRRDAHPMAVMCGTVGALSAFYHDSTDITDPHQRMVASLRMIAKMPTIAAMAYKYHIGQPFVYPKNDLDYASNFLHMCFAVPCEDYKVDPVLARAMDRIFILHADHEQNASTSTVRLAGSSGANPFACIAAGIACLWGPAHGGANEAALNMLNEIGSVDRIPEYIARAKDKNDPFRLMGFGHRVYKNYDPRAKIMQKTMYEVLEATGNSDDPIMQVALELEKIALSDPYFVEKKLYPNVDFYSGITLKALGFPTTMFTVLFALARTVGWIAQWNEMIEDPQQRIGRPRQLYTGAGKRDYVPVSKR

SEQ ID NO: 12039 - protein, 495 aa, Thermus thermophilus
MPLITTETGKKMHVLEDGRKLITVIPGDGIGPECVEATLKVLEAAKAPLAYEVREAGASVFRRGIASGVPQETIESIRKTRVVLKGPLETPVGYGEKSANVTLRKLFETYANVRPVREFPNVPTPYAGRGIDLVVVRENVEDLYAGIEHMQTPSVAQTLKLISWKGSEKIVRFAFELARAEGRKKVHCATKSNIMKLAEGPKRAFEQVAQEYPDIEAVHIIVDNAAHQLVKRPEQFEVIVTTNMNGDILSDLTSGLIGGLGFAPSANIGNEVAIFEAVHGSAPKYAGKNVINPTAVLLSAVMMLRYLEEFATADLIENALLYTLEEGRVLTGDVVGYDRGAKTTEYTEAIIQNLGKTPRKTQVRGYKPFRLPQVDGAIAPIVPRSRRVVGVDVFVETNLLPEALGKALEDLAAGTPFRLKMISNRGTQVYPPTGGLTDLVDHYRCRFLYTGEGEAKDPEILDLVSRVASRFRWMHLEKLQEFDGEPGFTKAQGED

SEQ ID NO: 12040 - protein, 360 aa, Agrobacterium tumefaciens str. C58
MNMVVTYKHIDEMKPWSDKLQLLECISVTPETSDVMTFLFRSEDQNWFRYLPGQFVTLELPVGSEPIYRTYTLSSSPSRPYALSVTVKAQATSIGTRWMFDNLKPGMKVRALGPLGDFSYVKHPGDKYLFISAGSGVTPMMSMVRDMSDRAPQSDITFINCSRTPGDIVFRHELEYLARFMPNLSLGFIVEKCGRTDLWSGLRGMVDKAKIALLAHDFMDRTVFCCGPEPFMAAVRSMLDASGFDMSRYHQESFAPAAPVSVGETVLTGADGEALSMVGFTLSGKELPCQPGQTVLMTARAAGVRIGAACESGICGTCRVLKLSGEVEMNHNGGILDEEIEEGYILACCSRPLTDIKVEA

SEQ ID NO: 12041 - protein, 373 aa, Arabidopsis thaliana
MGYLLEETLSSNSKTPIVIDDDNELGLMAVRLANAAAFPMVLKAALELGVFDTLYAEASRSDSFLSPSEIASKLPTTPRNPEAPVLLDRMLRLLASYSVVKCGKVSEGKGERVYRAEPICRFFLKDNIQDIGSLASQVIVNFDSVFLNTWAQLKDVVLEGGDAFGRAHGGMKLFDYMGTDERFSKLFNQTGFTIAVVKKALEVYQGFKGVNVLVDVGGGVGNTLGVVASKYPNIKGINFDLTCALAQAPSYPGVEHVAGDMFVDVPTGDAMILKRILHDWTDEDCVKILKNCWKSLPESGKVVVIELVTPDEAENGDINANIAFDMDMLMFTQCSGGKERSRAEFEALAAASGFTHCKFVCQAYHCWIIEFCK

SEQ ID NO: 12042 - protein, 112 aa, Glycine max
  misc_feature (37)..(37): Xaa can be any naturally occurring amino acid
MASSMISSPAVTTVNRAGAGMVAPFTGLKSMAGFPTXKTNNDITSIASNGGRVQCMQVWPPVGKKKFETLSYLPDLDDAQLAKEVEYLLMKGWIPCLEIQLEQRFVFREPHQ

SEQ ID NO: 12043 - protein, 435 aa, Bacillus cereus ATCC 10987
MGVITLTTGEKITVTNGVMNVPNNPIIPFIEGDGIGPDIWAAASRVLEAAVEKAYDGEKKIVWKEVLAGEKAFNQTGEWLPEETLNLIREYLIAIKGPLTTPVGGGIRSLNVALRQELDLYVCLRPVRYFEGVPSPVKRPEDTDMVIFRENTEDIYAGIEYAQGSPEAEKVLTFLKEAMGVNKIRFPETSGIGIKPISEEGTKRLVRAAIQYAINEKRSSVTLVHKGNIMKFTEGAFKNWGYEVAEQEFGDKVFTWAEYDRIVEKDGKDAANKAMADAEVAGKIIVKDSIADIFLQQILTRPREFDVVATMNLNGDYISDALAAQVGGIGIAPGANINYVTGHAIFEATHGTAPKYAGLDKVNPSSVLLSGVLLLEHLGWNEAAKLVTASVEKTIASKVVTYDFARLMEGATEVKCSEFANELIKNMDVAIIKNA

SEQ ID NO: 12044 - protein, 496 aa, Staphylococcus epidermidis ATCC 12228
MELVDKLSNRQYIDGEWVESSNKNTRDIINPYNQETIFTVAEGTKEDVERAILAARRSFEDGEWSLETSEVRGKKVRAVADKIKENREELAKLETLDTGKTLEESYADMDDIHNVFMYFAGLADKDGGEIINSPIPNAESKVVKEPVGVVTQITPWNYPLLQASWKIAPALATGCSLVMKPSEITPLTTIRVFELMEEVGFPKGTINLVLGAGSEVGDVMSGHEEVDLVSFTGGIETGKHIMKQAANHVTDVALELGGKNPNIIFDDADFELAVDQALNAGYFHAGQVCSAGSRILVHNDIKDKFEKALIDRVSKIKLGNGFDQDTEMGPVISTAHRDKIEGYMEVAKKDGATIAIGGKRPEREDLQAGLFFEPTVITDCDTSMRIVQEEVFGPVVTVEGFADEEEAIRLANDSIYGLAGAIFTKDIGKAQRVANKLKLGTVWINDFHPYFAQAPWGGYKQSGVGRELGKEGLEEYLVSKHILTNTNPEPVDWFSK

SEQ ID NO: 12045 - protein, 371 aa, Bacillus cereus ATCC 10987
MTVIRGLEGVVATTSSVSSIIDDTLTYVGYNIDDLAENATFEEVVYLLWHRKLPNEQELAEFKEIVSEYYKVPGEILAYLKQVDLKIAHPMSVLRTAISMLSLYDESAEIMDEKSNYLKAVKLQAQVGTLVAAYARIRKGLDVVEPRNDLSLAANFLYMLNDREPNEVEIEAFDKALVLHADHELNASTFTARVCVATLSDVYSGITAAIGALKGPLHGGANENVMKMLTEIGEEENVESYIHNALQNKVKIMGFGHRVYEHGDPRAKHLREMSKRLCVLLGEEKWYNMSIKIEDIVTKEKGLPPNVDFYSASVYHCLGIDHDLFTPIFAISRMSGWLAHILEQYENNRLIRPRADYNGPTHQVYVPIAQR

SEQ ID NO: 12046 - protein, 144 aa, Rubrobacter xylanophilus DSM 9941
MLSPFRGFRDLQSEMDRLFGEAFGRPPRADAEGGWTPAVDVLTRGDDLIIRAELPGVRREDVEVTVSNGVLTLAGERREEEERERAGYLIRERRQGSFRRSMTLPEGVNEDEIKATFRDGVLEVSVPGASAAVEAPPRRIEIEG

SEQ ID NO: 12047 - protein, 255 aa, Triticum aestivum
MAMEARMKGTVKWFNDTKGFGFISPDDGSEDLFVHQSSINADGFRSLAEGEVVEFAVSEGDDGRTKAVDVTGPDGSFVQVGAGGGGGGFGSRGGGGSRGGGGFGGRGGDGSGGYGGGYGGGGSGGWGGQRRSGGGGAGGACFKCGEPGHMARDCSVNGPAGGGGGGGCYKCGEQGHIARDCFNGGAGGGGGGYGGGGGGNCYSCGEPGHIARDCPTSSGFGGGGGGRFGGGGGGGGDRTCYHCGETGHISRDCTK

SEQ ID NO: 12048 - protein, 142 aa, Chlorobium tepidum TLS
MALTLYGKDPLKMFEDVFNERLTPFISSMGSMMAPAFKVDISEDEKAIYLSADIPGVKKEDVKVSIEDDVISISAERTQEEEEKKKNYHRVERSWGSLSRSFTIGDNVDSDNITANYDNGVLKVVIPKKEPEQKKSKEIAVS

SEQ ID NO: 12049 - protein, 73 aa, Triticum aestivum
MASRSCTFVEILLAVILPPLGVFLRYGCCSMEFLICLLLTILGYIPGIIYAIYVLVAHGSASEESGKDYDALA

SEQ ID NO: 12050 - protein, 365 aa, Zea mays
  misc_feature (77)..(77): Xaa can be any naturally occurring amino acid
MGSTAGDVAAVVDEEACMYAMQLASSSILPMTLKNAIELGLLEVLQKEAGGGKAALAPEEVVARMPAAPGDPAAAAXAMVDRMLRLLASYDVVRCQMEDRDGRYERRYSAAPVCKWLTPNEDGVSMAALALMNQDKVLMESWYYLKDAVLDGGIPFNKAYGMTAFEYHGTDPRFNRVFNEGMKNHSVIITKKLLDFYTGFEGVSTLVDVGGGVGATLHAITSRHPHISGVNFDLPHVISEAPPFPGVRHVGGDMFASVPAGDAILMKWILHDWSDAHCATLLKNCYDALPENGKVIVVECVLPVNTEATPKAQGVFHVDMIMLAHNPGGKERYEREFRELAKGAGFSGFKATYIYANAWAIEFIK

SEQ ID NO: 12051 - protein, 365 aa, Triticum aestivum
MGKGGKGEAAAAVAGEGENMAAWLVAKNTLKIMPFKLPPLGPYDVRVRMKAVGICGSDVHYLKEMRIAHFVVKEPMVIGHECAGIIEEVGDGVKHLAVGDRVALEPGISCWRCRHCKGGRYNLCDDMKFFATPPYHGSLADQIVHPGDLCFKLPDNVSLEEGAMCEPLSVGVHACRRADVGAEKSVLIMGAGPIGLVTMLSARAFGAPRIVIADVDDHRLSVAKSLGADAVVKVSGNTEDLAGEIERIQAAMGGDIDVSLDCAGFSKTMSTALEATRPGGRVCLVGMGHNEMTVPLTSAAIREVDVVGIFRYKDTWPLCLEFLRSGKIDVKPLITHRFGFSQGEVEEAFEVSARGRDAIKVMFNL

SEQ ID NO: 12052 - protein, 206 aa, Schizosaccharomyces pombe
MNDHLKVVVTILNLPTPISLAPYFTSSIILKYSMFRIASRQTRNLRALSSSKNWARSLVNTRSFRAAASVQNNNAQIGEMVDKISSLSLLETSELVKQLKEKLNIAEIAPMAAVAPAVASAAPSEEKAPEEKKEEKTTWNLKLESFDAGSKAKVIKEVKSLLGLSLVDAKKFVESAPKVLKENILKEDAEAIKSKLEKLSCKVVLE

SEQ ID NO: 12053 - protein, 413 aa, Arabidopsis thaliana
MGSGRYLDDPLTFTRNPPSSSSPITESSFLAESISRSGSFESGSLRGGDGDCFSDVDFALDKLAGTVQFYERHVFLCYKKPSVWPARIEASEFDRLPRLLSSVISARKSSMKKETLLTICEGHDGSETSNGDVLIFPDMIRYRRLTHFDVDTFVEEVLVKGVEWLPGNPESLSSSYVFVCCHGSRDRRCGVCGPSLVSRFREEIDSCGLRGEVSVSPCSHIGGHKYTGDVIIYGLNINQRVTGHWYGCVTLEDVPLLLEQHINKGEIVDRLWRGEMGLPEEDQKKTQEQRLQLNSEKISNREVTQESVNNSICCQSRAVPELNGSGCQQNGNSSYCLEEIHTEKNTSERVTSVKNASLRIGSSENGSSGGFKVCAVMSMWLETWEREDTYAALAVACAAASVAIAYNCYKQLK

SEQ ID NO: 12054 - protein, 350 aa, Escherichia coli CFT073
MRFLLGVLMLMISGSALATIDVLQFKDEAQEQQFRQLTEELRCPKCQNNSIADSNSMIATDLRQKVYELMQEGKSKKEIVDYMVARYGNFVTYDPPLTPLTVLLWVLPVVAIGIGGWVIYARSRRRVRVVLEAFPEQSVPEGKRAGYVVYLPGIVVALIVAGVSYYQTGNYQQVKIWQQATAQAPALLDRALDPKADPLNEEEMSRLALGMRTQLQKNPGDIEGWIMLGRVGMALGNASIATDAYATAYRLDPKNSDAALGYAEALTRSSDPNDNRLGGELLRQLVRTDHSNIRVLSMYAFNAFEQQRFGEAVAAWEMMLKLLPANDTRRAVIERSIAQAMQHLSPQESK

SEQ ID NO: 12055 - protein, 106 aa, Zea mays
MEHGSLTDSTSSTFSIMDEDHTLANSARFVLNQDPRVAFCGYTIPHPSEKKVNIRLQTTGDAAKDVLKDALQNLMIMCQHVRGTMDTAVVNHRAKNAAEEMDVDQN

SEQ ID NO: 12056 - protein, 203 aa, Candidatus Ehrlichia extremiorentalis
ESKITFIDGNKGILRYRGYNIEDLVKSCKSFIEVVYLLFYGTFSDIEDLQNFMLQISQEYMPPKIVEDVVKSFPQNSHPMAILMACFSALASYYYDQRIIKDELKCITLAVSKIAGIVAIIYRHITGQNFIQANKELTYSENFVHMMFDIFSYKFTQVVSKALDIIFILHADHEQNASTAAVRLSGSSGANLFACLGAGAATL

SEQ ID NO: 12057 - protein, 109 aa, Glycine max
MSGVWVFKNGVVRLVENPGGEAVEGSRGGRRKVLVHRASNEVITSYAVLEQKLYSLGWERYYDDADLLQFHKRSTVHLISLPRDFNKFKPMHMYDIVVKNKNAFEVRDM

SEQ ID NO: 12058 - protein, 353 aa, Aspergillus nidulans FGSC A4
MRAVRFHGRRDIRVDQIDEPSCAEGQVKIRPAFVGICGSDLHEYLSGPIAIPTTPHPLTGAQLPVTLGHEFSGTIEEVGQGVTGFKVGDRVAVRPNLSDGTCASCVYGRPNCCRSLGFIGFSSNSGGLSDYVTVPAKHAILLPESVPLDLGALVEPLTVAWHAVARSPHETARTALVVGGGPIGLAVVQVLKARGVQTVVVAEVSTQRREYALTLGATHVFNPLTDDVVARVRSLTDNAGADISFECSGVQAGFDTAMNGIRVRGTTTIVSLWEKKPMIDAFDVVSYEKHVIGAAICDDGDFEAVIGAIKDGKLNPRPMITSKIRMEDVEEKGFKALVDEKDKHVKILIDIAA

SEQ ID NO: 12059 - protein, 117 aa, Oryza sativa (japonica cultivar-group)
MARAQLVLVAVVAALLLAAPHAAVAITCGQVNSAVGPCLTYARGGGAGPSAACCNGVRSLKSAARTTADRRTACNCLKNAARGIKGLNAGNAASIPSKCGVSVPYTISASIDCSRVR

SEQ ID NO: 12060 - protein, 181 aa, Brassica napus
MASVMLSSATMASSPAHATMVAPFIGLKSSAAFPVTCKANTKVTSITSNGGRVNCMKVWPPVGKKKFETLSYLPDLTDVEIAKEVDYLIRNKWTPCIEFELEHGFVYREHGNIPGYYDGRYWTMWKLPLFGCTDSTQVLKEVKKCKQESPNPFIRIIGFDNNRQAQCISFFAYKPPSFTDA

SEQ ID NO: 12061 - protein, 217 aa, Chloroflexus aurantiacus
MQIYLDTANLAEIREAASWGILSGVTTNPTLIAREKGADFKAIITEIAELVDGPISAETISLDAEGMVREGLEYASWHPNVIIKVPSTTEGLRAVSQLAKHGIRCNVTLCFNSVQALLAARAGAFIISPFVGRVDDTGVDGMALIREIAGIYRQDREITTKILAASIRHPRHIVEAALAGADIATCPFKVLQQAMRHPLTDRGIEQFLADWKSRMSS

SEQ ID NO: 12062 - protein, 297 aa, Triticum aestivum
  misc_feature (66)..(66): Xaa can be any naturally occurring amino acid
MKTFLVFALLALAAASAVAQISQQQQQPPFSQQQQPPFSQQQQSPFSQQQQQPPFLQQQQPPFSQXHQFHHQPQQQFPQTQQPQQPFPQPQQTFPQQPQLPFPQQPQQPFPQPQQPQQPFPQSQQPQQPFPQPQQQFPQPQQPQQSFPQQQQPAIQSFLQQQMNPCKNFLLQQCNHVSLVSSLVSIILPRSDCQVMQQQCCQQLAQIPQQLQCAAIHSVAHSIIMQQEQQQGVPILRPLFQLAQGLGIIQPQQPAQLEGIRSLVLKTLPTMCNVYVPPDCSTINIPYANIDAGIGGQ

SEQ ID NO: 12063 - protein, 316 aa, Buchnera aphidicola str. APS (Acyrthosiphon pisum)
MNQLSALKQFSIIVADTSDIKSICKYQPEDATTNPSLILQAVSSNTNQNFVDQAVQYAKKKGGLYKDQIINASDKILVDLGIEILKKIPGYISSEVDARLSFSTEASILKAKKIIDLYEEQGISRNRVLIKLAATWECIKAAEELKKDSILCNLTLLFSFAQARACAESNVFLISPFVGRIYDWYISQNLLSKSFLGKDPGVISVCKIYEYYKKYGYKTIIMGASFRNIQQILYLSGCDRLTISPVLLKELESNTAKIDRNLAPPSFISVPPVALSEEEFRWEHNQDAMAVQKLSDGIRNFGKDQLRLEKIFSKKI

SEQ ID NO: 12064 - protein, 158 aa, Azotobacter vinelandii
MRDPLFGIPLDDQPRTLADFPGRAWLVVNTASRCGFTPQYEGLQMLWQRYRERGLVVLGFPCDQFGHQEPGNELEIAEFCQLRYGVDFPLFQKVEVNGPRAHPLFVELKKRAPGLLGSQRVKWNFTKFLIGREGRVVRRFAPATGPRELCGEIEALLE

SEQ ID NO: 12065 - protein, 277 aa, Agrobacterium tumefaciens str. C58
MHNVTANGATIPALGFGTFRIPGSDVLRIVPHALKVGFRHVDTAQIYGNEAEVGEAIANSGVARGDIFLTTKVWVENYGHDAFIKSVDESLKKLKTDYVDLLLLHWPNEAVSLAEQIGALNEVKEAGKVRHIGVSNFNTELMAESVKLSRAPIVTNQIEYHPYLSQDVVIAAARKAGMSVTGYFGMADGKVFNDPVLRDIGARHGKSVAQVVLRWLVQQEGVIALSKTVGEARVLENFAIFDFALSADEMAAIHALAVPGGRIVSPDGLAPVWDKAA

SEQ ID NO: 12066 - protein, 500 aa, Oryza sativa (japonica cultivar-group)
MENSQMWLLWGALSVALFFYFSTLRRRYAGGKPLPPGPTPLPLIGNLHLVGGGTFHHKLRDLARVHGPVMTLKLGLATNVVISSREAAIEAYTKYDRHLAARATPDTFRACGFADRSMVFIPSSDPQWKALRGIHASHVFTPRVLAAVRPIRERKVGDLIAYLRAHAGEEVLVGHAMYTGILNMVSFSYFSVDIVDMGSQMARELREVVDDIILVVGKPNVSDFYPFLRPLDLQGLRRWTTKRFNRVFSIMGDIIDRRLAHIRDNKPRHDDFLDSILELMAAGKIDRVNVLNMLFEAFVAGADTMALTLEWVMAELLKNPSVMAKARAELRDVLGDKEIVEEADAARLPYLQAVLKEAMRLHPVGALLLPHFAMEDGVEVGGYAVPKGSTVLFNAWAIMRDAAAWERPDEFVPERFVERTPQLDFRGKDVEFMPFGSGRRLCPGLPLAERVVPFILASMLHTFEWELPGGMTAEELDVSEKFKTANVLAVPLKAVPVLIK

SEQ ID NO: 12067 - protein, 109 aa, Glycine max
  misc_feature (28)..(28): Xaa can be any naturally occurring amino acid
  misc_feature (44)..(44): Xaa can be any naturally occurring amino acid
  misc_feature (80)..(81): Xaa can be any naturally occurring amino acid
EIFGGYLYFHKAPNKEEFHIETYHKIKXLHQYNYLRANKSTFTXNLEAHIPFLDKAFINTTISINPKSKIIKRNKRRIKXXILKRAFNNKEHPYLPKHILYRQKKQFSN

SEQ ID NO: 12068 - protein, 493 aa, Glycine max
MEPNQLFSTHFRDGTIASCIEGQHRGAIPSVIVIGAGISGLAAARSLYDASFKVTVLESRDRLGGRIHTDFSFGCPVDMGASWLHGVCNENPLAPLIRGLGLSLYRTSGDNSVLYDHDLESYMLFNIDGKQVPQQMVIEVGDTFKKILEETGKVRDEHTEDISVSQAISIVLDKHPDLRQQGLAHEVLQWFICRMEAWFAADADMISLKTWDQEHVLSGGHGLMVQGYDPVIKVLAKDIDIRLNHRVKKISSGYNKVMVTVEDGRNFVADAAIITVPIGILKANLIEFEPKLPDWKVSAISDLGVGNENKIALRFDKVFWPNVELLGTVAPTSYTCGYFLNLHKATGHPVLVYMVAGRFAYDIEKLSDEAAANFVMQQLKKMFPNASKPVQYLVSRWGTDPNSLGCYSYDLVGKPTDVYDKLRAPLGNLFFGGEAVSLDNQGSVHGAYSAGVMAAENCESYLLEKLGHAEKLSLASVRHEMLETLIPLQISRM

SEQ ID NO: 12069 - protein, 443 aa, Sulfolobus tokodaii str. 7
MLKKFNLIFSKDTGVITLSELDKKAIEISSKYKGKIQILPKVPIKSIDDFAVLYTPGIAAVSKEIAKNKELSFHYTYRWNAIAIVTDGTRVLGLGDIGPEAAMPVMEGKALIFKYLGGVDAIPLPIGTKDPDKIIETVKILEPAFGGINLEDIESPKCFYILDKLRQTVEIPVWHDDQQGTAGATLAGLITSLEITGKDPKNIRVILYGAGAANIATARLLYKYGVPYENMIVIDSKGPLYKGRNDEDSMKLENPWKYELLEKTNKIGARTIEDAFKGADVLIAASKPGPGVIKSDWIKLMNKDPIVFALANPVPEIWPDEAKNAGARIVATGRSDLPNQVNNSLIFPAVFRGALDVRAKTITDEMVIEAARELASFAREKGINENYIIPKMTEWEVYPRVAAAVGMKAIQQGIARVSLSYDEIYSSAREIINSARKLLSSLT

SEQ ID NO: 12070 - protein, 379 aa, Arabis procurrens
MITTGQIIRCKAAVAWEAGKPLVMEEVEVAPPQKHEVRIKILFTSLCHTDVYFWEAKGQTPLFPRIFGHEAGGIVESIGEGVTDLAPGDHVLPIFTGECGDWPHCHSEESNMCDLLRINTERGGMIHDGESRFSINGKPIHHFVGTSTFSEYTVIHSGQVAKINPDAPLDKVCIVSCGLSTGLEAPLNVANPKKGQSVAIFGLGAVGLAAVEGARIAGASRIIGVDLNSKRFDEAKKFGVTEFVNPKDHDKLVQQVIAEMTNGGVDRSVECTGSVQAMIQAFECVHDGWGVAVLVGVPSKDDAFKTHPMNFLNERTLKGTFFGNYKPKTDIPGLVEKYMNKELEIEKFITHTVPFSEINKAFDYMMKGEGIRCIITMGA

SEQ ID NO: 12071 - protein, 199 aa, Staphylococcus epidermidis ATCC 12228
MSESNHITWHDSEVTKKQRQHKNGHKSAVIWFTGLSGSGKSTVSVALEKELFNEGKQTYRLDGDNVRHGLNKNLGFSPEDRSENIRRIGEVAKLMVDAGALTVTAFISPYKEDREGVRALLEDNEFIEVYTKCSVEECEKRDPKGLYKKARSGEIPEFTGISAPYQAPENPEITIDTEHDTIEQSVEQIIRYLKEHEYI

SEQ ID NO: 12072 - protein, 294 aa, Saccharomyces cerevisiae
MKTLVHVASVEKGRSYEDFQKVYNAIALKLREDDEYDNYIGYGPVLVRLAWHISGTWDKHDNTGGSYGGTYRFKKEFNDPSNAGLQNGFKFLEPIHKEFPWISSGDLFSLGGVTAVQEMQGPKIPWRCGRVDTPEDTTPDNGRLPDYDKDAGYVRTFFQRLNMNDREVVALMGAHALGKTHLKNSGYEGPWGAANNVFTNEFYLNLLNEDWKLEKNDANNEQWDSKSGYMMLPTDYSLIQDPKYLSIVKEYANDQDKFFKDFSKAFEKLLENGITFPKDAPSPFIFKTLEEQGL

SEQ ID NO: 12073 - protein, 167 aa, Triticum aestivum
MCPIKREMSGESGSPSPCSGENFCSPSASPERQQARQAGWTSAPAKRPAGRTKFRETRHPVYRGVRRRGNAGRWVCEVRVPGRRGSRLWLGTFDTAEAAARANDAVMLMLAAGGAACLNFADSAELLSVPVASSYRSLDEVRHAVVEAVEDLLRREALAEEDALSGT

SEQ ID NO: 12074 - protein, 473 aa, Ralstonia eutropha JMP134
MKTLDQFYIDGQWVDPAPGATAMDIINPATEAVAGKVALGTAADVDRAVAAARAAFPAWSQTSRETRIAMLERITALYKARMTDIAEAVRTEIGAPVALCNTLQAPIGLAHLAAATETLRKFEFETEYGNNYVRHEPIGVAALVTAWNWPLSLICAKTAAALAAGCTVVLKPSEIAPLDAAIFAEIMHEAGTPAGVFNMIYGEGKTVGARLSSHPDVDVISITGSTRAGVEVALSAAPTVKRVHQELGGKSPLLILDDADLQAAVTTGVTQVMMNSGQTCIAPTRMLVPRERYAEAVAVAAAVANAIPVGDPADAATKMGPISNRAQYEKVQRMIGAGIEEGARVAAGGTGRPDGLECGFFARPTVFADVNNGMAIAREEIFGPVLVMIPYDGEEDGIAIANDTPYGLAAYVASGDTARARRVAARLRAGSVRINGAQVDLAMPFGGYKASGNGRENGAYGLAEFFECKSVML

SEQ ID NO: 12075 - protein, 379 aa, Barbarea vulgaris
MITTGQIIRCKAAVAWEAGKPLVMEEVEVAPPQKHEVRIKILFTSLCHTDVYFWEAKGQTPLFPRIFGHEAGGIVESVGEGVTDLQPGDHVLPIFTGECGDCPHCHSEESNMCDLLRINTERGGMIHDGESRFSINGKPIHHFLGTSTFSEYTVVHSGQVAKINPEAPLDKVCIVSCGLSTGLGATLTVAKPKKGQSVAVFGLGAVGLGAAEGAKMAGASRIIGVDLNPKRFEEAKKFGVTEFVNPREHDKPVQQVIADMTNGGVDRSVECTGSVQAMIQAFECVHDGWGVAVLVGVPSKDDAFKTHPMNFLNERTLKGTFFGNYKPKTDIPGVVEMYMNKELELEKFITHTVPFSEINKAFDYMLKGESIRCIITMGA

SEQ ID NO: 12076 - protein, 209 aa, Arabidopsis thaliana
MNNDDIILAEMRPKKRAGRRVFKETRHPVYRGIRRRNGDKWVCEVREPTHQRRIWLGTYPTADMAARAHDVAVLALRGRSACLNFADSAWRLPVPESNDPDVIRRVAAEAAEMFRPVDLESGITVLPCAGDDVDLGFGSGSGSGSGSEERNSSSYGFGDYEEVSTTMMRLAEGPLMSPPRSYMEDMTPTNVYTEEEMCYEDMSLWSYRY

SEQ ID NO: 12077 - protein, 475 aa, Synechococcus elongatus PCC 6301
MYEKIQPPSEGSKIRFEAGKPIVPDNPIIPFIRGDGAGVDIWPATERVLDAAVAKAYGGQRKITWFKVYAGDEACDLYGTYQYLPEDTLTAIREYGVAIKGPLTTPIGGGIRSLNVALRQIFDLYACVRPCRYYTGTPSPHRTPEQLDVVVYRENTEDIYLGIEWKQGDPTGDRLIKLLNEDFIPNSPSLGKKQIRLDSGIGIKPISKTGSQRLIRRAIEHALRLEGRKRHVTLVHKGNIMKFTEGAFRDWGYELATTEFRTDCVTERESWILANQESKPDLSLEDNARLIEPGYDAMTPEKQAAVVAEVKAVLDSIGATHGNGQWKSKVLVDDRIADSIFQQIQTRPGEYSVLATMNLNGDYISDAAAAVVGGLGMAPGANIGDEAAIFEATHGAAPKHAGLDRINPGSVILSGVMMLEYLGWQEAADLITKGISQAIANREVTYDLARLMEPAVDQPLKCSEFAEAIVKHFDD

SEQ ID NO: 12078 - protein, 416 aa, Escherichia coli
MESKVVVPAQGKKITLQNGKLNVPENPIIPYIEGDGIGVDVTPAMLKVVDAAVEKAYKGERKISWMEIYTGEKSTQVYGQDVWLPAETLDLIREYRVAIKGPLTTPVGGGIRSLNVALRQELDLYICLRPVRYYQGTPSPVKHPELTDMVIFRENSEDIYAGIEWKADSADAEKVIKFLREEMGVKKIRFPEHCGIGIKPMSEEGTKRLVRAAIEYAIANDRDSVTLVHKGNIMKFTEGAFKDWGYQLAREEFGGELIDGGPWLKVKNPNTGKEIVIKDVIADAFLQQILLRPAEYDVIACMNLNGDYISDALAAQVGGIGIAPGANIGDEYALFEATHGTAPDIAGQDKANPGSIILSAEMMLRHMGWTEAADLIVKGMEGAINAKTVTKDFESLMDGAKLLKCSEFGDAIIENM

SEQ ID NO: 12079 - protein, 330 aa, Bartonella taylorii
STASCESKITYIDGNKGILLYRGYPIDQLAEKGDFLESCYLLLYGELPTKQEKHDFDRCIMQHTMVHEQFARFFHGFRRDSHPMAVMVACLGAMSAFYHDSIDITDPQQRMIASVRLISKVPTLAAMAYKYSIGQAFVYPRNDLSYAANFLRMCFCVPCEEYKINPVLTRAMDRIFILHADHEQNASTSTVRLAGSSGANPFACIAAGVACLWGPAHGGANEACLKMLQEIGSVERIPEFIARAKDKNDPFRLMGFGHRVYKNYDPRAKIMQKTCHEVLKELNIQGDPLLDIAMELEKIALNDEYFVEKKLYPNVDFYSGITLKALGFPT

SEQ ID NO: 12080 - protein, 330 aa, Bartonella taylorii
STASCESKITYIDGNKGILLYRGYPIDQLAERGDFLESCYLLLYGELPTQQEKHDFDRCIMQHTMVHEQFARFFHGFRRDSHPMAVMVACLGAMSAFYHDSIDITDPQQRMIASVRLISKVPTLAAMAYKYSIGQAFVYPRNDLSYAANFLRMCFCVPCEEYKINPVLTRAMDRIFILHADHEQNASTSTVRLAGSSGANPFACIAAGVACLWGPAHGGANEACLKMLQEIGSVERIPEFIARAKDKNDPFRLMGFGHRVYKNYDPRAKIMQKTCHEVLKELNIQGDPLLDIAMELEKIALNDEYFVEKKLYPNVDFYSGITLKALGFPT

SEQ ID NO: 12081 - protein, 262 aa, Glycine max
MVSISDHELVLIFGLLGNIVSFMVFLAPLPTFYTIYKKKSSEGFQSIPYAVALLSALLLLYYGFIKTNATLIITINCIGCVIEVSYLAMYIIYAPRKQKISTLVMILIADIGGFGLTMLITTFAVKGINRVHAVGWICAIFNIAVFAAPLSIMRRVIKTKSVEFMPFSLSLFLTLCATMWFFYGFFDKDNFIMLPNVLGFLFGISQMILYMIYKNAKKNGEINCTEQQERDGTVNSKQHSCNGNKLDFPSLVEMKENQLNQV

SEQ ID NO: 12082 - protein, 330 aa, Bartonella grahamii
STASCESKITYIDGDKGILLYRGYPIDQLAEKGDFLESCYLLLYGELPTQQEKNEFDRCIMQHTMVHEQFARFFHGFRRDSHPMAVMVACLGAMSAFYHDSIDITDPHQRMIASVRLISKVPTLAAMAYKYSIGQAFVYPRNDLSYAANFLHMCFAVPCEEYKTNPVLARAMDQIFTLHADHEQNASTSTVRLAGSSGANPFACIAAGVACLWGPAHGGANEACLKMLQEIGSIKRIPEFIARAKDKNDSFRLMGFGHRVYKNYDPRAKIMQKTCHKVLKELNIQDDPLLDIAIELERIALSDEYFIEKKLYPNVDFYSGITLKALGFPT

SEQ ID NO: 12083 - protein, 330 aa, Bartonella grahamii
STASCESKITYIDGDKGILLYRGYPIDQLAEKGDFLESCYLLLYGELPTQQEKNEFDRCIMQHTMVHEQFARFFHGFRRDSHPMAVMVACLGAMSAFYHDSIDITDPHQRMIASVRLISKVPTLAAMAYKYSIGQAFVYPRNDLSYAANFLHMCFAVPCEEYKTNPVLARAMDQIFTLHADHEQNASTSTVRLAGSSGANPFACIAAGVACLWGPAHGGANEACLKMLQEIGSIKRIPEFIARAKDKNDPFRLMGFGHRVYKNYDPRAKIMQKTCHEVLKELNIQDDPLLDIAIELEKIALSDEYFIEKKLYPNVDFYSGITLKALGFPT

SEQ ID NO: 12084 - protein, 96 aa, Glycine max
  misc_feature (17)..(17): Xaa can be any naturally occurring amino acid
DSSMISYPADTTDNPAXAEMTAPFTDLNALHVLPTIKTNNELTSIASNPGKLLCMQVCTPLVNKKFETLSYLPDLDDATFEDEPEYLLMNGWIPCL

SEQ ID NO: 12085 - protein, 330 aa, Bartonella grahamii
STASCESKITYIDGDKGILLYRGYPIDQLAEKGDFLESCYLLLYGELPTQQEKNEFDRCIMQHTMVHEQFARFFHGFRRDSHPMAVMVACLGAMSAFYHDSIDITDPHQRMIASVRLISKVPTLAAMSYKYSIGQAFVYPRNDLSYAANFLHMCFAVPCEEYKTNPVLARAMDQIFTLHADHEQNASTSTVRLAGSSGANPFACIAAGVACLWGPAHGGANEACLKMLQEIGSIKRIPEFIARAKDKNDPFRLMGFGHRVYKNYDPRAKIMQKTCHEVLKELNIQDDPLLDIAIELEKIALSDEYFIEKKLYPNVDFYSGITLKALGFPT

SEQ ID NO: 12086 - protein, 487 aa, Bacillus sp. KSM-K16
MAIKTEVVFGNYINGRWKQEAASPLASINPSDAEEVVGYVQNSTADVVDEAVEVAKGALLSWRKLTGAERGHYLYQAANQLESRLDEIAETLAREMGKTLPEAKGETARGVAILRYYAGEGLRADGEVIPSTDSEALMFTKRVPLGVVGVITPWNFPIAIPVWKIAPALIYGNTVVFKPATEAAVTAAKVVECFAQAGLPKGVLNLVTGSGKVIGNALVAHEHVHGLTFTGSEQTGKQIGKAAAARGAKYQLEMGGKNPVIVAEDADLHVAVDATISGAFRSTGQKCTATSRVIVAEAILQDFQELLLEKTKQITIGKALDDGVWMGPCASEAQLRTVLDYIEIGKKEGAKLLCGGKRVTDGNRAAGYFVEPTIFTNVNRHMRIAQEEIFGPVIALITAKNMEEAIEIANDSRYGLSASIFTTNIEKMLLFIDEMDAGLVRVNAESAGVELQAPFGGMKASSSHSREQGQAAKEFYTSIKTVFVKGR

SEQ ID NO: 12087 - protein, 447 aa, Chlorobium limicola
MADPNHRNSLTITDNRTGKSYELPIENGTVRTMDLRQIKASEDDFGLLGYDPAFLNTCSCKSQITFIDGEKGILRYRGYPIEQLAEKSSFLETAYLLIKGELPDKERLAVWTYNIRHHTMTHANLTKFMDGFRYDAHPMGILVGTVGALSTFYPDAKQVSEEESRKLQVRRLIGKIPTLAAMSFRHSLGFPYVLPDNDLSYAGNFLSMMFRMTEQKYEPNPVLEKALDVLFILHADHEQNCSTNAVRSVSSSMVDPYSAIAAGCAALYGPLHGGANEAVIRMLEGIGSVDNIPAFIKSVKSGEGRLMGFGHRVYKNYDPRARIIKKIAFEVFEETGRNPLLDIAIELERIALEDDYFVGRKLYPNVDFYSGLIYQAMGFPTDMFPVLFAIGRTPGWLAQWIEHVKDPEQRIARPRQIFLGAPCRDYVPLDERPSRGDDEEKFGICRL

SEQ ID NO: 12088 - protein, 144 aa, Zea mays
MAMAYKMATEGMDVKEECQRWFMEMKWKKVHRFVVYRIDERSRAVLVDRVGGPGEGYEELVAALPGDDCRYAVFDFDFVSVDNCQKSKIFFIAWSPAASRIRAKILYATSKQGLRRLLDGVHYEVQATDPSEMGFDETVLPIDY

SEQ ID NO: 12089 - protein, 125 aa, Thermus thermophilus
MALDIERIKEELSQATVLELKQLIDALKEAWGVTAAAPVAVAAAPAAGAAAAPAEEKTEFDVILKEAGAKKLEVIKDVRAITGLGLKEAKDLAEKGGPVKEGVSKQEAEEIKKKLEAVGAVVELK

SEQ ID NO: 12090 - protein, 120 aa, Gossypium hirsutum
MASSMSLKPACVAVLCMVVGAPLAQGAVTCGQVTSSLAPCIGYLTGNGAGGVPPGCCGGIKSLNSAAQTTPDRQAACKCIKSAAAGISGINYGIASGLPGKCGVNIPYKISPSTDCNSVK

SEQ ID NO: 12091 - protein, 161 aa, Lilium sp.
FLRSISMGSKLTREEYNTLLAAFHKLMVRLEVASVPKDATPADIKNLPDAYLYFIDMPGVRTGEIKVEVEDDSDLVISGGRKREEEEKYQIMERWTGRRMRKFELPKNADTKAVSAVWKNGVLAVTVGKLLAWEVAGLFFNIERLPVPLPTKTKSIEVKIA

SEQ ID NO: 12092 - protein, 226 aa, Triticum aestivum
  misc_feature (109)..(109): Xaa can be any naturally occurring amino acid
  misc_feature (143)..(143): Xaa can be any naturally occurring amino acid
SGRGKALHQYDCLRANKATSAWGLEARVPFLDKDFINEAMSIDPEWKMVRPDLGRIEKWVLRKAFDDEEQPFLPKHILYRQKEQFSDGVGYSWIDGLQAHAASNVADKXCLSNAKFIFPHNTPTTKEAYYYRMIFERFFPTEXAILTVPGGPSVACSTAKAIEWDAQWSENLDPSGRAALGVHLAAYEHEQDPKHVPDTIAAGGSKKPRTIRVAAAPPPPGVAIEG

SEQ ID NO: 12093 - protein, 483 aa, Arabidopsis thaliana
MVITANDLSKWENFPKGLKVLLLLNGCDSDGDGSSAAETRSELESMDYIVTTFTDETEALSAVVKNPESFHIAIVEVNMSAESESFKFLEAAKDVLPTIMISTDHCITTTMKCIALGAVEFLQKPLSPEKLKNIWQHVVHKAFNDGGSNVSISLKPVKESVVSMLHLETDMTIEEKDPAPSTPQLKQDSRLLDGDCQENINFSMENVNSSTEKDNMEDHQDIGESKSVDTTNRKLDDDKVVVKEERGDSEKEEEGETGDLISEKTDSVDIHKKEDETKPINKSSGIKNVSGNKTSRKKVDWTPELHKKFVQAVEQLGVDQAIPSRILELMKVGTLTRHNVASHLQHRKNILPKDDHNHRWIQSRENHRPNQRNYNVFQQQHRPVMAYPVWGLPGVYPPGAIPPLWPPPLQSIGQPPPWHWKPPYPTVSGNAWGCPVGPPVTGSYITPSNTTAGGFQYPNGAETGFKIMPASQPVSVNNSLFSF

SEQ ID NO: 12094 - protein, 224 aa, Lactococcus lactis subsp. lactis Il1403
MDNLKKQVGIKAAEFVKSGMVVGLGTGSTAAYFVEELGRRIAEEQLEITGVTTSNVTSSQARALGIPLASIDEVDYVDLTVDGADEIDSSLNGIKGGGAALLMEKIVATYSKDYIWIVDESKLSENLGSFKIPVEVIPYGSQQVFKKFEAAGYAPTWRLNEENERLITDMHHFIIDLHISQIKEPEKLAEELDLMGGVVEHGLFNNMVKKVIVAGNEGVRIINK

SEQ ID NO: 12095 - protein, 279 aa, Zea mays
MATPAAEKPEDVEIREVWADNLETEFAVIRDIVDDYPYVAMDTEFPGVVCRPLGTYKSAAEFNYATLKANVDMLKLIQLGLTLSDEHGGLPALGPDGRPCVWQFNFRGFDPRTDVAAADSIDLLRRSGIDFSRHAADGVDSRCFAELLMSSGVVLNSDVHWVTFHSGYDFGYLLKLLTGTNLPDTLPGFFDLIKIYFPVIYDIKHLMRFSNSLHGGLNKLAELLDVARVGICHQAGSDSLLTALSFKKLKEAYFNGLTEKYAGVLYGLGFEGVETTSAH

SEQ ID NO: 12096 - protein, 499 aa, Candida tropicalis
MAISSLLSWDVICVVFICVCVYFGYEYCYTKYLMHKHGAREIENVINDGFFGFRLPLLLMRASNEGRLIEFSVKRFESAPHPQNKTLVNRALSVPVILTKDPVNIKAMLSTQFDDFSLGLRLHQFAPLLGKGIFTLDGPEWKQSRSMLRPQFAKDRVSHISDLEPHFVLLRKHIDGHNGDYFDIQELYFRFSMDVATGFLFGESVGSLKDEDARFSEAFNESQKYLATRATLHELYFLCDGFRFRQYNKVVRKFCSQCVHKALDVAPEDTSEYVFLRELVKHTRDPVVLQDQALNVLLAGRDTTASLLSFATFELARNDHMWRKLREEVISTMGPSSDEITVAGLKSCRYLKAILNETLRLYPSVPRNARFATRNTTLPRGGGPDGSFPILIRKGQPVGYFICATHLNEKVYGNDSHVFRPERWAALEGKSLGWSYLPFNGGPRSCLGQQFAILEASYVLARLTQCYTTIQLRTTEYPPKKLVHLTMSLLNGVYIRTRT

SEQ ID NO: 12097 - protein, 309 aa, Glycine max
MSLIAEAPNFLKLYSDGSVKRFDPEIVPASLESTKGYKSKDVIIDSSKPITGRIFLPDYPTSSKKLPLLVYFHGGGFCIGSTTWLGYHNFLGDFSVTSQSIILSVDYRLAPEHRLPIAYEDCYTSLEWLGDQVSCEPLLQQIDLTRVFLSGDSAGGNIAHHVAVKAIQNNECPLKIKGLMLIHPYFGSEKRTKNEMADESIKDVAMNDMFWRLSIPEGLNRDYFGCNFEKTDLSTSVWSKFPAIGVYVAGKDFLKERGVRYAEFLKKKGVKEVELVEAKEETHVFHVYYPESCATRLLQNQMSLFMEKY

SEQ ID NO: 12098 - protein, 154 aa, Brassica napus
  misc_feature (143)..(143): Xaa can be any naturally occurring amino acid
  misc_feature (150)..(150): Xaa can be any naturally occurring amino acid
MAAALASRISRGGRSLLGGLKNDFSGSMTSSTGMMNGSILLPQQQQQRRTFIQMGTVLKVVDNSGAKKVMCIQALKGKKGARLGDTIVASVKEAMPNGKVKKGAVVYGVVVRAAMQRGRVDGSEVRFDDNAVVLGDNKDKKTXTDRQPIXTRVF

SEQ ID NO: 12099 - protein, 220 aa, Zea mays
MCGILAVLGCSDCSQARRARILACSRRQAPVHCTGTELFSYRNHKESNGRETRMGRSEKEHGNLTRSSNPVLKHRGPDWSGLYQHEGNFLAQQRLAIVSPLSGDQPLFNEDRTVVVVANGEIYNHKNVRKQFTGAHSFSTGSDCEVIIPLYEKYGENFVDMLDGVFAFVLYDTRDRTYVAARDAIGVNPLYIGWGSDGQTQTQRGVAFSQCGRAKQSTPA

SEQ ID NO: 12100 - protein, 352 aa, Triticum aestivum
  misc_feature (24)..(24): Xaa can be any naturally occurring amino acid
  misc_feature (121)..(121): Xaa can be any naturally occurring amino acid
  misc_feature (150)..(150): Xaa can be any naturally occurring amino acid
GRLKEDAARKYFQQLICAVDFCHXSRGVYHRDLKPENLLLDENSNLKGAAAGAGTISECRRLDGLLHTSCGTPAYVAPEVINRKGYDGAKADIWSCGVILFVLLAGYLPFQDKNLMNMYKXRLGKAEFKCPSWFPSDIRRVLAKGFLDPXNPSTRISIERIMEHPWFRKGLDAKPRGRNLQAKDAGPAADMTATSDPLSCSNSATEGKEQEAKKLSNLNAFDIISLSTGLDLSGMFEDNDKKRESKFTSTNSASTIVSKIEDIAKCMRLKLVKKDGGMMRMESFKPGRKGVMSIDAEIFEVTPDFHLVELKKTNGDTIEYQKVLNQEMRPALKDIVWAWQGEQQPPPPPQSC

SEQ ID NO: 12101 - protein, 503 aa, Muscari armeniacum
MSFTDHHYLLLILFLIPILVYTIRRKISSTKSKLPPCPPKLPLIGNLHQMGTLPHQSLHALSVKYGPLMLLKLGQIPTLIVSSADMAREIMKTHDHIFASRPSLMTAGIILYGSMDVVFAPYGEHWRQMRKLCVNHLLSPKAVQSFRRMHEEEVATMVAKISEVSSSSGVVNMSETLNLFASNAMLKAISRKLFRDERRSRVICELNEETAAILGQFSVSDFMPLLAWFDMVFGVGARAKKTARLWDRVLHEIIEDCRNRRDSEVNTDFVNVLLALLEDNDMDFSLNKDIIKAVLQDMIAAGTETSSTAMDWCMAELVRNPEAMKKLQDEVRGIANTKPMITDDDLSKMGYLKAVIKELLRLHPPVPLLIPRESMDHCEVQGFDIPKQTRVIVNAWSIGRDPNVWEAPEEFRPERFLDCAINFRGHDFELIPFGAGRRICPGMQFAVSTLELALANLVRSFDWELPDGMNNEDLGMGDGPGLSARRRQSLLLVAKPFLGLKCM

SEQ ID NO: 12102 - protein, 512 aa, Candida tropicalis
MLDQILHYWYIVLPLLAIINQIVAHVRTNYLMKKLGAKPFTHVQRDGWLGFKFGREFLKAKSAGRSVDLIISRFHDNEDTFSSYAFGNHVVFTRDPENIKALLATQFGDFSLGSRVKFFKPLLGYGIFTLDAEGWKHSRAMLRPQFAREQVAHVTSLEPHFQLLKKHILKHKGEYFDIQELFFRFTVDSATEFLFGESVHSLKDEEIGYDTKDMSEERRRFADAFNKSQVYVATRVALQNLYWLVNNKEFKECNDIVHKFTNYYVQKALDATPEELEKQGGYVFLYELVKQTRDPKVLRDQSLNILLAGRDTTAGLLSFAVFELARNPHIWAKLREEIEQQFGLGEDSRVEEITFESLKRCEYLKAVLNETLRLHPSVPRNARFAIKDTTLPRGGGPNGKDPILIRKDEVVQYSISATQTNPAYYGADAADFRPERWFEPSTRNLGWAFLPFNGGPRICLGQQFALTEAGYVLVRLVQEFPNLSQDPETKYPPPRLAHLTMCLFDGAHVKMS

SEQ ID NO: 12103 - protein, 319 aa, Lactobacillus johnsonii NCC 533
MKRIGILTSGGDAPGMNAAIRAVTRTALANGIEVCGIRYGYAGLVAGDIFQMTSETVADKISRGGTFLYSARFPEFKEEEVQLKGIEQLKKHGIDALVVIGGDGSYHGALKLTRHGYNAIGLPGSIDNDIPYTDYTIGFDTACNTAMEAIDKIRDTATSHQRVFVVNVMGRDCGDIAMHVGVATGADAIVIPEEPYDIKEIAENLKQGFANGKKHGIVVLAEGVMDAEKFKDELLKYGDFDARANVLGHMQRGGSPTMRDRVVASEMGAYAVKLLLEGKGGLAVGMENNKLTHHDILDLFDAKHHGNYALYSLNKDLAK

SEQ ID NO: 12104 - protein, 480 aa, Bacillus subtilis
MHPRFFLIHSFPLTHKLEKLEYERKRCGSVEKTKLTGRIVTRDDPDYNEARTNINLSLERYPDIIVFCQNKQDALNALKWARENRVPFRIRGGRHSYENFSLLNNGLVIDLSEMKKITVNQDKKLAYIEAGAELGEVYRTLWQYGLTLPAGTIANVGLTGLTLGGGIGLLTRAAGLTCDSLVQLEMIVADEKEGADLITVSCSNHPDLFWASQGGGGGNFGIVTSMTFKAVPISQVSIFSITWGWDDFEEVYNTWQNWPPYTDDRLTSSIEFWPKEVNRIEALGQFVGPKTELKKLLKPLLKAGSPTSGMVKTTPFIEAVTFFNSPGGNQPQKMKRSGSFIEKPLSERAISTIKHFLEHAPNQNASVWQQALGGAAGRVAPDQTAFYYRDAIIAQEYLTNWTSPGEKRQNVRWIEGLRTSLSKETMGDYVNWPDIEIRNWPRTYYGENVERLRRVKTTYDPENVFRFEQSIPPLRRSLFF

SEQ ID NO: 12105 - protein, 260 aa, Triticum aestivum
  misc_feature (168)..(168): Xaa can be any naturally occurring amino acid
MLRENTMASLVFLVALLLSCSSMSSAARYLEEAVPKKEYPPHLIVPELPKPELPPHPVVPELPKPEPPHPLVPEVPHPVVPKSPKEPEVPHPVVPEVPKHELPPHPAMPELPKPELPHPAVPEVPKEPEVPHPVVPEVPKEHELPHPVVPEVPKEPEVPHPVVPEVTXEPKVPHPVVPGVPKEHELPHPAMPELPKPEMPHHAVPEVPKEPHVSHPEVPKEPELPHPAVPEVPKHEMPPFPKAELPPKPEFHFPEPEAKP

SEQ ID NO: 12106 - protein, 75 aa, Triticum aestivum
  misc_feature (34)..(35): Xaa can be any naturally occurring amino acid
  misc_feature (42)..(42): Xaa can be any naturally occurring amino acid
MSEGTANCVDILIAIILPPLGVFLKVRGAARFWXXLLLTFLXYTPGIIYAIYAIHQRTPTHPPDDIHSLYRVSYA

SEQ ID NO: 12107 - protein, 307 aa, Glycine max
MSRALEHDYIGLAENPSMDGKNSSSLNLKETELRLGLPGCESPERKSGSALCLFGKELQNNNNNVCSLKAGAKRGFSDAIDTSSVTEGSQGASALFSPRGGNVGKPLIGLDTQTNTTIKEVGAVPQSAKPVQENNDQFAATNAHAIAPAAKAQVVGWPPIRSFRKNTMASNLTKNNDEAEGKSGFGCLYVKVSMDGAPYLRKVDLKTYNNYMELSSALEKMFSCFTIGQCNSPGLPGKDGLSESSLRDLLHGSEYVLTYEDKDGDWMLVGDVPWEMFTDSCRRLRIMKGSEAIGLAPRAMEKSRSQN

SEQ ID NO: 12108 - protein, 136 aa, Zea mays
  misc_feature (120)..(120): Xaa can be any naturally occurring amino acid
MTRVIHDSGDGMQKEALDLVSSDVNFPKGCFPDYRIGPNNQIIDPEETHEAVPLKEVVAKETAQLVEQHRRLSVRDLKEKFEKGLSSASKLSEEAKRREAASLDRQVLLKKLRDVLDTLXRSCGWSNKDDAEEAIS

SEQ ID NO: 12109 - protein, 364 aa, Pichia anomala
MSEKTIVVLPGDHVGTEITNEAIKVLKAIEEVRPNVKFNFQHHLIGGAAIDATGVPLPDEALEAAKKADAVLLGAVGGPKWGTGAVRPEQGLLKIRKELNLYANLRPCNFASESLLELSPIKAEFAKGTDFTVVRELVGGIYFGERKEDDGSGVASDTETYSVPEVQRITRMAAFMALQHNPPLPIWSLDKANVLASSRLWRKTVTETIEKEFPQLTVQHQLIDSAAMILIKSPTTLNGIVITSNMFGDIISDEASVIPGSLGLLPSASLASLPDTNKAFGLYEPCHGSAPDLPANKVNPIATILSAAMMLKLSLDLFEEGVALEKAVKEVLDAGVRTGDLRGSNSTKEVGDAAVEAAKRILKN

SEQ ID NO: 12110 - protein, 144 aa, Arabidopsis thaliana
MTNVRLPILVSSVLFLVFISSSLLFPTPSFAARVSHSLVQEEVKKVPEYTEPEEPEVPEEPELPSPEEPEIPEEPEIPEEPEVPGEPEVPEEPEEPEEPAGSTFEFPSWFPSFPIPGVNGGLPKTEKTKPTSTVEEVNVSNKKP

SEQ ID NO: 12111 - protein, 314 aa, Thermus thermophilus
MDYGMYFFEHVTPYETLVRRMERVIASGKTPFQDYFLFESKGFGKVLILDKDVQSTERDEYIYHETLVHPAMLTHPEPKRVLIVGGGEGATLREVLKHPTVEKAVMVDIDGELVEVAKRHMPEWHQGAFDDPRAVLVIDDARAYLERTEERYDVVIIDLTDPVGEDNPARLLYTVEFYRLVKAHLNPGGVMGMQTGMILLTHHRVHPVVHRTVREAFRYVRSYKNHIPGFFLNFGFLLASDAFDPAAFSEGVIEARIRERNLALRHLTAPYLEAMFVLPKDLLEALEKETMVSTDQNPFYVTPEGEARQAPYKG

SEQ ID NO: 12112 - protein, 115 aa, Zea mays
HVDYACTPEEVQQHFNSCGTVNRVTILTDKFGQPKGFAYVEFVEVEAVQEAIKLNESELHGRQLKVAPKRTNVPGMKQPRGRGFNPYRPYGYSPYGYGYGYGRFPRFRRPRRPYF

SEQ ID NO: 12113 - protein, 499 aa, Oryza sativa (japonica cultivar-group)
MENSQVWLLWGALSVAVLFYLSTLRRRYAGGKPLPPGPTPLPLIGNLHLAGGTFHHKLRDLARVHGPVMTLKLGLATNVVISSREAAIEAYTKYDRHLAARATPDTFRACGFADRSMVFIPSSDPQWKALRGIQGSHVFTPRGLAAVRPIRERKVGDLIAYLRAHAGEEVLLGQAMYTGLLNLVSFSYFSIDIVDMGSQMARDLREVVDDIISVVGKPNISDFYPFLRPLDLQGLRRWTTKRFNRVFSIMGDIIDRRLAHIRDGKPRHDDFLDSLLELMATGKMERVNVVNMLFEAFVAGVDTMALTLEWVMAELLHNPAIMARVRAELSDVLGGKEAVEEADAARLPYLQAVLKEAMRLHPVGALLLPHFAAEDGVEIGGYAVPRGSTVLFNAWAIMRDPAAWERPDEFVPERFLGRSPPLDFRGKDVEFMPFGSGRRLCPGLPLAERVVPFILASMLHTFEWKLPGGMTAEDVDVSEKFKSANVLAVPLKAVPVLIK

SEQ ID NO: 12114 - protein, 195 aa, Rhodospirillum rubrum
MEQASKGSGGGDWLIRGVFSLGLALASFGGPASAQAAGAHDYSFPAIDGGTLPLAAWAGHPVLVVNTASECGFTAQYEGLEALWKAYRAKGLIVLGVPSNDFGGQEPGSAAEIKDFCESTFAVDFPLTDKTAVSGARAHPFYAWAKASRPDLSAPRWNFHKYLIAPDGSLAASFSALTDPKDRDLTDAIDKLLEK

SEQ ID NO: 12115 - protein, 175 aa, Oryza sativa (japonica cultivar-group)
MELSVVGGEPLLAVAMQQLLDLDLPDELERQLNPPTRAYVRDRRAMANTPMDVKELRASGALVLAVDMPGVAPADVRVEVEDGNVLAISGERRRPAGDGDDGGEGVKYLRMERRMGKFMRRFPLPESADLDGVRAEYKDGVLTVTVDKKPPPEPKKPRVVEVKVAGAGEPKGKGK

SEQ ID NO: 12116 - protein, 336 aa, Zea mays
  misc_feature (194)..(194): Xaa can be any naturally occurring amino acid
  misc_feature (271)..(271): Xaa can be any naturally occurring amino acid
  misc_feature (283)..(283): Xaa can be any naturally occurring amino acid
  misc_feature (294)..(294): Xaa can be any naturally occurring amino acid
IGYLEAGRERLTGGNAWVVVVALQVRWIRALYSNFSEFTADQERLISLGSGGGGGRRFDYVEGFVVAAQGLINNWRSSFFSPQNPVKLTSLKHHSGVLYCLEVTKNYDDETAGSVDQDVDTLLGELNFLPGTVFTTDLPYVDFLDRVHKAELKLRAKGMWEVPHPWLNLFVPASRIADFDRGVFRGVLGGRTRXAGGPVLIYPMNKHKWDPRSSAVTPDEEVFYLVAFLRSALPGAAGEAWRALARQNQRILDFCAGAGIGAKQYLPGHKXARHEWAEHFGAXRGWDRFARLKXAEFDPRAILAAGQGIFRAARLAGARRPTRNVIQLLILIIRRV

SEQ ID NO: 12117 - protein, 498 aa, Triticum aestivum
KKNILIEKLHIDISPSLAPWRLVPVSGIENICSSSIDNLGLESSKDEESSNALLSRAWSPGWRNAEKTLEDFVSHGLLDYSKDRMKVAGTTTSLLSPYLHYGEVSVRKIYQLVRVQQIKWENEGKSGAGESVNLFLLSIGLREYSRYLCFNFPFTHERSLLGNLKHYPWRADEDRFKSWRQGMTGYPLVDAGMRELWATGWTHNRIRVIVSSFAVKFLQIPWTWGMKYFWDVLLDADIESDILGWQYISGSLPDGHELGRLDNPEVQGQKYDPDGEYVRTWIPELARMPGEWIHHPWDAPSSILEVAGVELGFNYPMPIVELHTARECLDDAISTMWQLDTAEKLAELDGEVVEDNLSHIKSFDVPKVVLKELSPHCDREVPTDDGRNLELQPKELKGTNKQTICVDVIKASKMEDTGSIANSPISRKRSSSGSVFNVPSYSSSVEVHSQNQHPGGYLVGSSKYILQKAERNCVGKAEDDDSADSGTNTSRASKRPAA

SEQ ID NO: 12118 - protein, 488 aa, Rubrobacter xylanophilus DSM 9941
MTTAAERVRVAGVEVSPDHFIGGERVASPRRFEDISPITNEPIAEVSRAGEAEVDAAVRAARDAFPGWAALGPAGRAPYLHRLADLIDANVERLAAVECMDMAMLLRSLRARVIRRGARNYRAYADLAASYEERDWRSQGTWNRVQRMPAGPAAIITPWNAPFMLSTWKTAPALAAGCTVVLKPAEWSPLSCSLLADLVAEAGFPPGVFNVVQGIGEEAGAALVAHPLLRRVSFTGSPETGRSIGVAAAKNLVPFTAELGGKGPLIVFEDADLDAAARRAAGQYDDAGQVCLAGTRLLVQESVAEEFLELFHRYADEHVLGDPRSEHTTVSPLIHPDHLRRVEGFVERARREGHRVLRGGRRSPAGPLFYQPTLIEPLSNDAEIVQREVFGPVLTLQTFADEEEAVSLANSTEYGLSGIVYTSSMGRADRVGRAVRAGVVWVNTFLVRDLTAPFGGMGISGIGREGGDYALDFYSDLKTLQILEGSTR

SEQ ID NO: 12119 - protein, 512 aa, Candida tropicalis
MLDQIFHYWYIVLPLLVIIKQIVAHARTNYLMKKLGAKPFTHVQLDGWFGFKFGREFLKAKSAGRQVDLIISRFHDNEDTFSSYAFGNHVVFTRDPENIKALLATQFGDFSLGSRVKFFKPLLGYGIFTLDGEGWKHSRAMLRPQFAREQVAHVTSLEPHFQLLKKHILKHKGEYFDIQELFFRFTVDSATEFLFGESVHSLRDEEIGYDTKDMAEERRKFADAFNKSQVYLSTRVALQTLYWLVNNKEFKECNDIVHKFTNYYVQKALDATPEELEKQGGYVFLYELAKQTKDPNVLRDQSLNILLAGRDTTAGLLSFAVFELARNPHIWAKLREEIESHFGSGEDSRVEEITFESLKRCEYLKAVLNETLRLHPSVPRNARFAIKDTTLPRGGGPNGKDPILIRKNEVVQYSISATQTNPAYYGADAADFRPERWFEPSTRNLGWAYLPFNGGPRICLGQQFALTEAGYVLVRLVQEFPSLSQDPETEYPPPRLAHLTMCLFDGAYVKMQ

SEQ ID NO: 12120 - protein, 170 aa, Pasteurella multocida subsp. multocida str. Pm70
MKEEVMKVTSSAIKNGAFEDKYGKRGKQFSPNGMPTYSIPFDISEVPVGTKSFAVVLEDKDAITASGFVWIHWLIANLERTSVQENESLTATDYVQGANSWASVLGKFDIAEASFYGGMAPPNSLHRYELIVYALDCKLDLSAGFRFNDLHFAMQGHILDQAVIMGTYDV

SEQ ID NO: 12121 - protein, 469 aa, Methanosarcina acetivorans C2A
MLKNVQKLGKFLIIICMIFIALSSPAFAATAEENAVAIEGVQTALTFVWLLLASGLVFFMHAGFSLVETGLTRSKNTANILMKNFMTIVLGILIYWAVGWGVMYGADAAGLIGTDQFFLSGADNALWNGWFFQMVFAATGATIVSGAMAERTNFKAYLIYCIMMVAVIYPVYGHWVWSGADLALLTGADSPIVQAIGVPSHDFAGSGVVHSIGGYSALAGVLLVGARIGKFKDGKAVPIPGHNLTIAFLGTLILALGWIGFNGGSTLDGNDPYMNLVVVNTFLAAAAGAVVTMLITWMKTGKPDPSLTANGLLGGLVAITAPCGSVNNWAAIIIGAIAGIIIYAGVMFNENTLKVDDPVGAIAVHGYCGSWGLISVGLFSIGIGNGILADAAYAAEVPGLFYGGGISLLLIQLISVLCSIVWAFGISFIIFKILDAVVGLRVSEEEEIMGLDICEHGIRAYPEYLMREE

SEQ ID NO: 12122 - protein, 294 aa, Zea mays
MTMYSQSVRAPPPPPCRFVPRPCYVMARPLLVFTPSGALLKAAVRDVWASNFDEELSNLSAVLPRYPCVCVDTEFPGAVHDSDLPRYMRGPRESYELVKRNVDDLKLLQVGIALSGPAGRFPIAWQFNIRGFDPALHPHAPASIAMLREQGMDFAMLNEFGIDPEDFAAGFRCSGLACGRLTWTAFSGSYDFGYLAKALTGGQPLPDTVDGFLALVRRLFGHSVFDVKHLARCCAMRGGLEQVATALGVKRAAGRAHCAGSDSLLTTDVLLLMLHRFFRNVDVLAHAGTIVDLT

SEQ ID NO: 12123 - protein, 321 aa, Haemophilus somnus 2336
MIKKIAVLTSGGDAPGMNAAIRGVVRSALSEGLEVYGIYEGYYGLYHNKIQQLTRYSVSDIINRGGTFLGSARFPEFKDPAVREKCVEILRSHGIDALVVIGGDGSYMGAKLLTEEHDFPCVGIPGTIDNDVAGTDYTIGYQTALETAVEAIDRLRDTSSSHKRISIVEIMGRHCSDLTISAAIAGGCEYIVASEIEFNREELIKQIERAIIKGKRHAIIAITELLCDVNELAREIEARVKHETRATILGHIQRGGTPCAFDRILGSRMGVYAVDLLLQGKGGYCVGIQNEQLVHHDIIDAINNMRREFKADWLAMSKRLD

SEQ ID NO: 12124 - protein, 383 aa, Anabaena variabilis ATCC 29413
MAKHLGKKIAPIPMSTDISVVDLIDNYFTAYNSARLREASQLLACDILKDGVTVGVSLSGAMTPAGFGVSALAPLIRNGFIDWMISTGANLYHDMHYGLGFELFAGNPFLDDVKLREEGTIRIYDIIFGYDVLLETDAFIRKILQAEPFQKRMGTAEFHYLLGKYVREVEKQLGVKHSCLLATAYEYGVPIYTSSPGDSSIGMNVAALALEGSQLVLDPAIDVNETAAIAYNAREGEGKSAAVILGGGSPKNFLLQTQPQIHEVLGLEERGHDFFVQFTDARPDTGGLSGATPAEAVSWGKIDPDELPSTIVCYTDSTIALPLVTAYILNQCPPRPLKRLYDRREELYDKLRTDYLAAKDQPVEKVATNGEVATYPCGTPIRQ

SEQ ID NO: 12125 - protein, 133 aa, Triticum aestivum
MAESAAIAPPPQPMTPPQPMAENATEAPPQPMAPPQQMAENATAAPPPQPMAENATAAPPPQPMVENATVVVVVPPPPPDSTTTFLCLILAFFLPPLGVFLKYKCEIEFWICLILTFLAYAPGIIYAVWVIVK

SEQ ID NO: 12126 - protein, 161 aa, Glycine max
MEPMDIVGKSKEDASLPKATMTKIIKEMLPPDVRVARDAQDLLIECCVEFINLVSSESNEVCNREDKRTIAPEHVLKALQVLGFGEYVEEVYAAYEQHKLETMALLYRLSGDYNPLHSDPMVAKVAGFSQPILHGLCTLGFAVRAIIKCICRGDPDLIKSV

SEQ ID NO: 12127 - protein, 255 aa, Triticum aestivum
MRKKLGTRFPAARIKKIMQADEDVGKIALAVPVLVSRALELFLQDLIDHSYKITLQSGAKTLNSFHLKQCVKRYSSFDFLTEIVNKVPDLGGGESCGDERGLPRRRKFSNGSDPENEEPRSSKMPIRSLNTSPRGRGRGRGRGRGRPPTKRKEIGYVQFEDESSMFAEQSEPLPGDEIVPETNRGNESIPQSSHPLVEAPSAMTPAVISKVEEASTNHQPDWPMPDAIGGIGVGPSSFGHLTVQVDEVEDYDNED

SEQ ID NO: 12128 - protein, 365 aa, Mycosphaerella graminicola
MPTYNIVVFGGDHCGPEVTAEALKVLDVIDNSNADVHFNIQPHLLGGASIDAHGEPLTDEALAAAKAADAVILGAIGGPKWGTGKVRPEQGILRLRKEMGTYGNLRPCFFASESLVKTSPLKEEVCRGVNFNIVRELTGGIYFGERTEDDGSGYAVDTEPYSRAEIERVARLAGFLALAEDPPCPVWSLDKANVMATSRLWRKTVTDVFANEFPQLKIGHHLIDSAAMLMVKNPRALNGVIVTSNLFGDIISDEASVIPGSLGLLPSASLTASPDGKSKCNGIYEPIHGSAPDISGKGIVNPVAMILSLGMMCKYSLQQPELAKKIDEAVRNVIEKGINTADIGGSAKTAEVGDAIAKELEALLK

SEQ ID NO: 12129 - protein, 365 aa, Fragaria x ananassa
MGSTGETQMTPTHVSDEEANLFAMQLASASVLPMVLKAAIELDLLEIMAKAGPGSFLSPSDLASQLPTKNPEAPVMLDRMLRLLASYSILTCSLRTLPDGKVERLYCLGPVCKFLTKNEDGVSIAALCLMNQDKVLVESWYHLKDAVLDGGIPFNKAYGMTAFDYHGTDPRFNKVFNKGMADHSTITMKKILETYKGFEGLKSIVDVGGGTGAVVNMIVSKYPSIKGINFDLPHVIEDAPQYPGVQHVGGDMFVSVPKGNAIFMKWICHDWSDEHCIKFLKNCYAALPDDGKVILAECILPVAPDTSLATKGVVHMDVIMLAHNPGGKERTEQEFEALAKGSGFQGIRVCCDAFNTYVIEFLKKI

SEQ ID NO: 12130 - protein, 483 aa, Burkholderia fungorum LB400
METETDLRRHDLLIDGKRLPPGTGEYSVDIDPATEEPIALVAQGSAADVDAAVHAARAALKVWNAIRSAERGRILMRLAGLMRANLEELAALESLDAGKPIAAVMRQDIPAAIDTLEYYAGWCDKINGQVVPVRPDALTYTLREPVGVVAAIVPWNFPLMIGMWKIAPALACGCTLIVKPAEITPLSALRIGELALEAGVPPGVLNIVTGKGRVVGDALVAHPGVDKVTFTGSPSVGRGILQGAAGNFKRVTLELGGKSANLIFPDANLDNAVRAAAAGIFFNTGQVCSAGSRILAHRDVYDEVVERLAARARSIKVGDPSSRETSMGPLISAAQMKTVLGYVETGRAEGASLVTGGARVGERGFFVEPTVFADVEHEMRISQEEIFGPVVSVIRFDDEADAIRIANGTLYSLAAGVWSADIGRVHRVARDLRAGTVWINTYGYTDVRLPWGGSGDSGFGREHGDVAIENFTEPKAVWLAIDQ

SEQ ID NO: 12131 - protein, 211 aa, Brassica napus
  misc_feature (202)..(202): Xaa can be any naturally occurring amino acid
MERGGFHGYGKFSLNTTNPSDPAKLLMAESGMQLPEPNQPTKTANGGQEECTVREQDRFMPIANVIRIMRRILPAHAKISDDSKETIQECVSEYISFVTGEANERCQREQRKTITAEDVLWAMSKLGFDDYIEPLTLYLHRYRELEGDRGVNCGVGSVSMTNGMVLKRPNGTMAEYGPYGTMAPYRYHHQNGFAYSGNDPNXKMGGSSSSF

SEQ ID NO: 12132 - protein, 377 aa, Candida albicans
MSADGEFTRTQIFGTVFEITNRYTELNPVGMGAFGLVCSAVDRLTGQNVAVKKVMKPFSTSVLAKRTYRELKLLKHLKHENLITLDDIFISPLEDIYFVNELQGTDLHRLLNSRPLEKQFIQYFTYQIMRGLKYIHSAGVIHRDLKPSNILINENCDLKICDFGLARLQDPQMTGYVSTRYYRAPEIMLTWQKYDTEVDLWSVGCILAEMIEGKPLFPGKDHVHQFSIITELLGSPPADVIDTICSENTLRFVQSLPHRDPIPFSERFASCTHVEPEAIDLLAKLLVFDPKKRISAVQGLTHPYMEAYHDPTDEPVCESKFDWSFNDADLPVDTWRVMMYSEILDFHQTVGVANETEGSEQPDSQVEQNNLDSANGA

SEQ ID NO: 12133 - protein, 454 aa, Rubrobacter xylanophilus DSM 9941
MSAFDLIVRGGTVVRGGCEVADVGVADGVISAVGPDLEGGAREEIDARGLLVLPGAIDAHVHFNEPGRTRWEGFASGTRALAAGGTTLCVEMPLNAHPPTTDGESFDLKLAAAKASAHVDFALWGGIVPGRVGRMEELAGRGVAGFKAFMSATGTPDFEAADDLTLYEGMQEAARLGLPVLVHAENRQITDALARRATSALRTTMRDYLASRPAVAELEAIGRAILLASEAGCSLHIVHVSTGRGVALVAAARERGVDVTCETCPHYLLFTDEDAVRIGAAAKCAPPLRPREEVESLWEQVLAGNVAFVTSDHSPCPPDMKAGEDMFRAWGGISGCQSLLPALLDEGYHGRGLPPERLAELLSANVARRFGFAGKGGIEEGNDADLALVDPSGEHVLREEDLHYRHPISPYVGRSFRGRVVRTILRGRTVFEGGRVVSGPAGRFVRPQREKGER

SEQ ID NO: 12134 - protein, 403 aa, Mycobacterium avium subsp. paratuberculosis str. k10
MKRVSELLESIQSRAEQGAITDAEIFAAHVGGKLSVSLTSPLDTQRALSIAYTPGVAQVSRAIAADHRQAAHYTWANRLVAVVSDGSAVLGLGDIGPAASLPVMEGKCALFQAYGGLNAIPIVLDTKDPDEIVETLVRLRPTFGAVNLEDISAPRCFEIERRLIEALDCPVMHDDQHGTAIVVLAALMGASKLLGRDMSSLKVVVSGAGAAGVACTNLLMAMGVSDITVLDSRGILHAGRDDMNDVKAALSRRTNPAGLTGSLAEAIRGADVFLGLSGGVVPEEMIAAMAPNGIVFALSNPDPEIHPQIAAKYATVVATGRSDFPNQINNVLAFPGVFRGALEAGARRITEKMMVAAAEAIFSVVSDDLAPDRIVPSPLDTRVGDAVATAVALATEVSDAPAG

SEQ ID NO: 12135 - protein, 158 aa, Escherichia coli K12
MKLISNDLRDGDKLPHRHVFNGMGYDGDNISPHLAWDDVPAGTKSFVVTCYDPDAPTGSGWWHWVVVNLPADTRVLPQGFGSGLVAMPDGVLQTRTDFGKTGYDGAAPPKGETHRYIFTVHALDIERIDVDEGASGAMVGFNVHFHSLASASITAMFS

SEQ ID NO: 12136 - protein, 458 aa, Burkholderia cepacia R18194
MTEETMASVISASKVDADAAVAAARRAFDHGPWPRMSLHQRMEVMARLRELLIEHESLIAHLVTEEMGCPISISRWMQAGGPISMLGMFLEVAPHYPFSQIRRTVTGNGLVLREPLGVVAAVVPWNAPLQIAVLKLAPALLAGNTAILKPAPETPLDACLLAELAEKAGLPKGVLNVLPADREVSEYLCLHPAVDKVSFTGSSAAGQRLGALCGNDIKRITLELGGKSPAIVLDDADIGKAVESLRMGSLRNSGQVCSNKTRLLVSKHRKDELIDAFVEMVRSMPVGDPFDPLTQIGPLVSARQRDRVEGYIAKGKQEARLVLGGGRPKGLTRGWFVEPTIFADVDPDAVIAQEEIFGPVISILSFDTDDDAVAIANNSAYGLHGAVFSADTERAVNVARRVRTGAIDINGASAGYHSPLGGRKKSGIGREAGIEGFDGYVEIKSIGIPVSYAEQLSS

SEQ ID NO: 12137 - protein, 117 aa, Spinacia oleracea
MASSAVIKLACAVLLCIVVAAPYAEAGITCGMVSSKLAPCIGYLKGGPLGGGCCGGIKALNAAAATTPDRKTACNCLKSAANAIKGINYGKAAGLPGMCGVHIPYAISPSTNCNAVH

SEQ ID NO: 12138 - protein, 500 aa, Schizosaccharomyces pombe
MTIDLNVIQSDIISARRAPENSLFIDGKFVSPIEPAAKPIPLINPATEEIIGTCANASAKDVDSAVENAYNTFRSGIWAKWPGKQRGLVLRKIAKMMREKRELLAGIDTINCGKPTPYALFDIDSCADMFEYYAEVAETDNPTVKVPLPNNPGFCAFEKRFPRGVIGVITPWNFPLKMALWKLVPAIASGNCVVLKPSELAPWSCLEFALICKEAGLPDGVLNVIIGSGKESGAALSCHPKIAYLAFTGSLATGKKIMHAAAENIVPLTLELGGKSPLIICEDADLSLAIPSAAFAIFFNQGEACTAASRLIVHESVADEVLGGLVSEANKLIIGNGLDPQVTLGPVVSKTQFEKIVSYIQSAINEGCKCVVGGLPRSEQKGYFIPPTVFTNVQTHNKIWREEIFGPVLAVKTFHTNEEALELANDSEYGLGSGVFSTNPKTLEFFSNNIEAGMCSLNNYHVVTHELPWIGWKHSGLGVGLSKHGYNEYMRLKQITQYVG

SEQ ID NO: 12139 - protein, 103 aa, Zea mays
  misc_feature (70)..(70): Xaa can be any naturally occurring amino acid
  misc_feature (77)..(77): Xaa can be any naturally occurring amino acid
  misc_feature (83)..(83): Xaa can be any naturally occurring amino acid
  misc_feature (95)..(95): Xaa can be any naturally occurring amino acid
  misc_feature (99)..(99): Xaa can be any naturally occurring amino acid
  misc_feature (101)..(101): Xaa can be any naturally occurring amino acid
MMLAYMDRRCFADVPGGALWEEVLHWAVDNHGLAPASWTDYLRLTVGGTLSNGGVSGQSFRYGPQVSNVXELEVVTXDGERRXCSPSSHPDLFFXVVGXLXQF

SEQ ID NO: 12140 - protein, 499 aa, Glycyrrhiza echinata
MDILSLLSYSVFYLALFFIFNIVIRARKFKNLPPGPPSLPIIGNLHHLKRPLHRTFKGLSEKYGHVISLWFGSRLVVVVSSASEFQQCFTKNDVVLANRPRFLSGKYIFYNYTTLGSTSYGEHWRNLRRITALDVLSNHRINSFSGIRRDETQRLITRLADDSSTNFAEIELSYRFYDMTFNNIMRMISGKRYYGEDCDMSDLQEASQFRDMVSELLQLSGANNKTDFMPLLRFLDFENLEKRLKDISGKTDAFLRGLIQEHRAKKERANTMIDHLLNLQDSQPEYYTDQIIKGLALAMLLAGTDSSAVTLEWSMSNLLNHPEVLKKVKDELDTHVGQDRLVDESDLPKLSYLKNVINETLRLYTPAPLLLPHSTSDECNIGGYKVPQDTIVLINAWAIHRDPELWTEATTFKPERFEKKGELEKLIAFGMGRRACPGEGLAIRAISMTLALLIQCFDWKLTNGDKIDMAERDGFTLTKLVPLKAMCKSRPVINKVFKQ

SEQ ID NO: 12141 - protein, 159 aa, Triticum aestivum
MAGMVFGLETPMMTALQHLLDIPDGEAGAAAGEKQGPTRAYVRDARAMAATPADVKELPGAYAFVVDMPGLGSGDIKVQVEDERVLVISGERRREEKEDAKYLRMERRMGKLMRKFVLPENADMEKISAACRDGVLTVTVDKLPPPEPKKPKTIQVQVA

SEQ ID NO: 12142 - protein, 359 aa, Haemophilus somnus 2336
  misc_feature (7)..(7): Xaa can be any naturally occurring amino acid
MLPVTEXIGGYFMKINTLSCVVKGAKSVDVISQEIEFDEQSQDQTLIQITRGSICGSDLHYYEHGKVGNFAIKHPMILGHEIIGKIVKTNAPNLFEGQKVAINPSKPCLSCAYCLSGYSNQCETMRFFGSAMYNPHVDGGFTQYKIVDNNQCIPYSQEVSDEVMVFAEPLAVTIHAAKQGGDLQGKKVFISGVGPIGCLAVAAVKALGAAEIICSDISQRCLDLALEMGATKVLHATEGNFSEYLQNKGEFDVSFEASGHISSIERCLAVTKAKGTIVQIGMGGSIPQFNMMPLISKEINWKGSFRFVEEFNTAVKWLSLGKINPLPLLSEIYPFEQLETALQRAGNKNEISKIQLNFA

SEQ ID NO: 12143 - protein, 497 aa, Pseudomonas putida KT2440
MLSELPILPATRAFLERKLKMRIGADWQDAASGRTLSFRNPATGEVLGEVPAAEAEDVDRAVRAARQAFDDSPWSRMRPRERQNLLWRLADLMERDARQLAELECLNNGKSAAVAQMMDVQLAIDFLRYMAGWATKIEGSTVEASMPLMPNDQFHGFVRREAVGVVGAIVAWNFPLLLACWKLGPALATGCTVVLKPADETPLSVLKLAELVDEAGYPAGVFNVVTGTGLNAGAALSRHPGVDKLTFTGSTEVGKLIGKAAMDNMTRVTLELGGKSPTIVMPDANLQEAAAGAATAIFFNQGQVCCAGSRLYVHRKHFDNVVADIAGIANAMKLGNGLDPAVQMGPLISAKQQDRVTGYIELGRELGATIACGGEGFGPGYFVKPTVIVDVDQRHRLVQEEIFGPVLVAMPFDDIDEVIGMANDNPYGLGASIWSNDLAAVHRMIPRIKSGSVWVNCHSALDPALPFGGYKMSGVGREMGSAAIEHYTELKSVLIKL

SEQ ID NO: 12144 - protein, 434 aa, Escherichia coli
MKTRTQQIEELQKEWTQPRWEGITRPYSAEDVVKLRGSVNPECTLAQLGAAKMWRLLHGESKKGYINSLGALTGGQALQQAKAGIEAVYLSGWQVAADANWRPACIRISRSIRQTRCPAVVERINNTFRRADQIQWSAGIEPGDPRYVDYFLPIVADAEAGFGGVLNAFELMKAMIEAGAAAVHFEDQLASVKKCGHMGGKVLVPTQEAIQKLVPARLAADVTGVPTLLVARTDADAADLITSDCDPYDSEFITGERTSEGFFRTHAGIEQAISRGLAYAPYADLVWCETSTPDLELARRFAQAIHAKYPGKLLAYNCSPSFNWQKNLDDKTIASFQEQLSDMGYKFQFITLAGIHSMWFNMFDLANAYAQGEGMKHYVEKVQQPEFAAAKDGYTFVSHQQEVGTGYFDKVTTIIQGGTSSVTALTGSTEESQF

SEQ ID NO: 12145 - protein, 507 aa, Bordetella parapertussis 12822
MTTVHSATPEETRRLLQQLGVDPARYDGGTLEVRSPIDGQAIARLPELTAEQARARVADARQAFLAWRKVPAPRRGELVRLLGEELRAAKAELGRLVSIETGKILSEGEVQEMIDICDFATGLSRQLYGLTIATERAEHRMMETWHPAGPVAIISAFNFPVAVWAWNAAIALVCGDSLLWKPSEKAPLTALATQALLERALARFGDAPAHLSQVLIGGREVGEALVDDPRIPIVSATGSTAMGRKVGPKVAERFGRSILELGGNNAAIICPSANLDLALCGIAFSAMGTAGQRCTSLRRIFVHEQIADDLVARLQQVYESVAIGDPRDSGTLIGPLRDQAAFDAMQRSLADARAAGGRVTGGAREPVGGHDQAYYARPALVEMPAQSEVVERETFAPILYVMRYRDLDEAIALQNDVPQGLSSSIFTNDLREAERFVSAEGSDCGIANVNIGPSGAEIGGAFGGEKETGGGREAGSDSWKAYMRRTTNTVNYGNALPLAQGVKFDVA

SEQ ID NO: 12146 - protein, 299 aa, Glycine max
  misc_feature (227)..(227): Xaa can be any naturally occurring amino acid
MCGILAVLGCVDNSQTKRARIIELSRRLRHRGPDWSGIHCYEDCYLAHQRLAIVDPTSGDQPLYNEDKTVIVTVNGEIYNHKQLRQKLSSHQFRTGSDCEVIAHLYEEHGEEFVNMLDGMFAFILLDTRDKSFIAARDAIGITPLYLGWGHDGSTWFASEMKALSDDCERFISFPPGHIYSSKQGGLRRWYNPPWFSEDIPSTPYDPTLLRETFERAVVKRMMTDVXPFGVLLSGGLDSSLVAAVVNRYLAESESARQWGSQLHTFCIGLKGSPDLKAAKEVADYLGTRHHELYFTVQE

SEQ ID NO: 12147 - protein, 224 aa, Listeria monocytogenes str. 4b F2365
MINQKKIAGEKACEWIKDGMVVGLGTGSTVYYTIEKLGEMVNNGLHITGVATSEETSKQAQNLGIPLKSLNDVAEIDITIDGADEIDTDFQGIKGGGGALLREKMVASASLKNIWVVSEEKLVRNLGKFPLPIEVIPFGWKQIERTLEKEHIQTILRRQSSGEIYVTNNGNYILDIVNQTFRDAEMWQEKLAQIPGIVEHGLFLHYVDIIVCAKANGEIELIKK

SEQ ID NO: 12148 - protein, 383 aa, Nostoc sp. PCC 7120
MAKHLGKKIAPIPMSTDISVVDLIDNYFTAYNSARLREASQLLACDILKDGVTVGVSLSGAMTPAGFGVSALAPLIRNGFIDWMISTGANLYHDMHYGLGFELFAGNPFLDDVKLREEGTIRIYDIIFGYDVLLETDAFIRKILQAEPFQKRMGTAEFHYLLGKYVREVEKQLGVKHSCLLATAYEYGVPIYTSSPGDSSIGMNVAALALEGSQLILDPAIDVNETAAIAYNAREGEGKSAAVILGGGSPKNFLLQTQPQIHEVLGLEERGHDFFVQFTDARPDTGGLSGATPAEAVSWGKIDPDELPSTIVCYTDSTIALPLVTAYVLNQCPPRPLKRLYDRREELYDKLRTDYLAAKDKPVEKVATNGEVATYPCGTPIRQ

SEQ ID NO: 12149 - protein, 250 aa, Zea mays
MAKNYPTVSAEYSEAVEKARRKLRALIAEKSCAPLMLRLAWHSAGTFDVSSRTGGPFGTMKHQSELAHGANAGLDIAVRLLEPIKEEFPILSYADFYQLAGVVAVEVTGGPEIPFHPGREDKPQPPPEGRLPDATKGSDHLRQVFGKQMGLSDQDIVALSGGHTLGRCHKERSGFEGAWTTNPLVFDNSYFKELLSGDKEGLLQLPSDKALLSDPVFRPLVEKYAADEKAFFDDYKEAHLKLSELGFADA

SEQ ID NO: 12150 - protein, 438 aa, Desulfovibrio desulfuricans G20
MALFTKEEALHYHEAPRHGKVEVIPVKPCRNQKDLSMAYSPGVAEACKAIKEDPSKAEIYTGRSNLVAVVSDGTAVLGLGNIGPLAGKPVMEGKGVLFKTFADIDVFDINLDVSSADQLIGVVKALEPTFGGINLEDIKAPECFYIEDTLKKEMNIPVFHDDQHGTAVISGAGLLNALEITNRKAENMKVVVVGAGAAGIACAKFYVSLGVDPANIYMFDSRGLIHKGRKDLNEYKALFAQPSDAGTLAEVMKGADMFLGLSTKNLVSQDMVRSMAKDPVLFAMANPDPEITYPDAKQASPNCIMGTGRSDFPNQVNNVSGFPYIFRGALDVGATEINEEMKVAAARSLAALAKEPVPSEICDMYGVKELTFGVDYVIPKPLDPRVLVWETPAVAKAAMDSGVARKPIADMEAYKKQLTTRFDESRKRIARVVDSYGL

SEQ ID NO: 12151 - protein, 168 aa, Sorghum bicolor
MAAASSATSVHDFTVKDASGKDVDLSTYKGKVLLIVNVASQCGLTNSNYTELAQLYEKYKDQGFEILAFPCNQFGGQEPGTNEEIVQFACTRFKAEYPIFDKVDVNGNNAAPIYKFLKSSKGGLFGDSIKWNFSKFLVDKEGRVVDRYAPTTSPLSIEKDIKKLLGSS

SEQ ID NO: 12152 - protein, 327 aa, Triticum aestivum
  misc_feature (181)..(181): Xaa can be any naturally occurring amino acid
MASTTAAVPEVALRSGGARPMPAIGMGTATFPVVPETTVKAVLEAVEVGYRHFDTAAMYATERPLGEALAEAVRRGLLASREEVFVTSKLWCTQCHPHLVLPSLRESLQNLQMEYVDLYLIHWPISLKPGPTVFPVKREDAVPFDFEGVWRAMEECHRLGLAKAIGVSNFTTSHLDKLLAXATVHPAVNQVELNPVWQQRKLREYCAEKGIHVAAYSPLGGQNWSGDGNAVLDSEVLAEIAKARGKTVAQVALRWIYEQGVTPIVKSFSKERLKENLGIFDWGLTDDDLRKIGQIPQKKIVKAETVLFSAEGEFTSADLADMEIVED

SEQ ID NO: 12153 - protein, 354 aa, Zea mays
  misc_feature (194)..(194): Xaa can be any naturally occurring amino acid
MDLASFITSVLTSFLIFVALVLLFTWLSRRPGNAPVYYPNLLLRGLDPWAGRGRGTRSPVGWLRDAISASEPDVVAAGGVDAAVYLVFLSSVLSILVYSGIVLLPVLLPVAATGGALSTIPIPTNKSAQSAQNFSSIERLGMGNVAEKSMRLWAFLLSVYWVSFVTYFVLWKSYKHVSNLRATARSAPDVKPEXFAVLVRDIPRPSPDETIKDSVDSYFRALHPNTFYRSMVVTDHTKADKIYREIEGHKRKIARAEVIYANSKTESNTEGTRPTHRTGFLGLIGTKVDTIEYCSEQIKELLPKLEAEQKTTLHEKQQRAAIVVFNSRSAAAFASQTLHAQVYDKWDSYGKLLN

SEQ ID NO: 12154 - protein, 206 aa, Paracoccidioides brasiliensis
RRLPRQLLPLFRPSILPNHAVRTFACSCSRMGSPLPPVTPPVSTAHASDSFQLLSSAEKTGPAEDALFNEQVKAVTEWWNTPRYEGIRRPYSAEAVVSKRGSLQQTYPSSIMARKLFNLLNERAKTGKPVHTLGAIDPVQMTQQAPNQEVLYISGWACSSLLTTTNEVSPDFGDYPYNTVPNQVQRLFKAQQMHDSKQWDSRRKLS

SEQ ID NO: 12155 - protein, 95 aa, Zea mays
HASAHASAHASAHASALSSASPLARLISRRGLAGAADGHGSAKVPLWKDPLSPSKWKEEHFVLASLSMWGVIFYGGYKLFSGKKEAKTEAASPQA

SEQ ID NO: 12156 - protein, 225 aa, Paracoccidioides brasiliensis
YWAEVQAVKEWWQDSRWRYTKRPFTAEQIVAKRGNLKIEYPSNVQSKKLWGILEERFKNKTASFTYGCLEPTMLTQMVKYLDTVYVSGWQSSSTASSTDEPSPDLADYPMNTVPNKVNQLWMAQLFHDRKQREERLRAPKSQRASLPNIDYLRPIIADADTGHGGLTAVMKLTKLFIERGAAGIHIEDQAPGTKKCGHMAGKVLVPISEHINRLVAIRAQADIMG

SEQ ID NO: 12157 - protein, 305 aa, Sulfolobus shibatae
MPLDPRIKKLLESGFVVPIGKASVDEVRKIFRQLASAAPKAEVRKVEDIKIPGSETSINARVYFPKAKGPYGVLVYLHGGGFVIGDVESYDPLCRAITNACNCVVVSVDYRLAPEYKFPSAVIDSFDATNWIYNNLDKFDGEMGIAIAGDSAGGNLAAVVALLSKGKLDLKYQILIYPAVGFDSVSRSMIEYSDGFFLTREHIEWFGSQYLRSPADLLDFRFSPIIAQDLSGLPPALIITAEYDPLRDQGEAYANRLLQAGVPVTSVRFNNVIHGFLSFFPLIDQGKDAIGLIGSVLRRTFYDKS

SEQ ID NO: 12158 - protein, 159 aa, Glycine max
MSDAPASPSHESGGEQSPRGSLSGAAREQDRYLPIANISRIMKKALPPNGKIAKDAKDTMQECVSEFISFITSEASEKCQKEKRKTINGDDLLWAMATLGFEDYIEPLKVYLARYREAEGDTKGSARSGDGSARPDQVGLAGQNAQVQPQSGYAFNARP

SEQ ID NO: 12159 - protein, 415 aa, Arabidopsis thaliana
MEQLWLFENEDRISELHEALLVHIMSSLPTKTVVATSVLSKRWRHVWKTVQNLKFVSKYHQTFSEDVYRFFMLHKAPFLESLDLEFSNQLDASDLGILVGIAFARHVRNLVLDLDYYSNFSQLCAARFPSGLCIYDNNKTLETLTLKHSILLYFPYRVCLKSLRKLHLYKVHFYGKDSVYNLLCGCPSLRDLIVHRYRECMETFTIAVPSLERLTIEDSGFGYGCCYVINAPSLKYLNIRRFKYLNSCLIEKAPELAEAKVSDVSDIENENILESLTSAKRLSIHLSPLEWWNLLTFMLEASPKLQILKLTDLNMSSTKGNQIGQKWIQPKCVPECLLFHLETFVWTGYEWQRRDEKEVARYILRNTTSLKKATFSTKPIEPVKLKVFKKRREILNELASLGRASNPSDFVFESI

SEQ ID NO: 12160 - protein, 217 aa, Triticum aestivum
PGPEGLEFHKAHGMTMYEYTKTDARLNRVFNEAMKSYTTIVTGKLVELYTGFEDVATLVDVGGGVGATIRAVTSKYPHIKGINFDLPHVIAEAPQSPGVEHVAGDMFKNVPSGDAIVLKWILHNWTDEHCTTLLRNCYNALPAHGKVVVVEGILPVEPEATSRGQQASLSDMIMLTHTAGGKERNQREFEQLAKAAGFTGVKTAYIYSNTWVIELTK

SEQ ID NO: 12161 - protein, 264 aa, Haloarcula marismortui ATCC 43049
MVGVGTWDIDGDTVQKSVRAGLNVGYAHVDTAEGYKNESEIGEALADYDREDVFLTSKVLPKHLDYESVIEACEASLDRLGTDYLDLYLVHWPNPATSIRETMNAMATLHDQGKIRNVGVSNFSAYQLGAAQHVADVPIAVNQIEYHPWNTQDQVVEFCRDTDTVVEAAAPLGRTKVFADDIIQDLSEKYDRSPAQIVLKWAVENNVVVLPKSSSPEHVRQNFDLFDWELDATDRERIDAIEREQAVYDTGINDWDNDTYGISQ

SEQ ID NO: 12162 - protein, 302 aa, Synechocystis sp. PCC 6803
MGEEPVPADKALGKKFKKKNASWSIEESEALYRVEAWGAPYFAINAAGNITVSPNGDRGGSLDLLELVEALRQRKLGLPLLIRFSDILADRLERLNSCFAKAIARYNYPNTYQAVYPVKCNQQRHLVEALVRFGQTSQCGLEAGSKPELMIALATLPPPLDRQDKHTKPLIICNGYKDQDYLETALLAKRLGHRPIIIIEQLRELEWVLHISQQLNIKPMLGVRARLSCQSLKSSEISSGNGDRAKLGLTMPDIVTVIHRLEENNCLDCLKMLHFHLGTQVSDIALIKEAMREASQLYVELV

SEQ ID NO: 12163 - protein, 537 aa, Glycine max
MAALNLCRMALRSSKLLSRPYHRLSVQLQMQMQPSSPPLTRKMSMDAQSVASQLNSSGLLRTQGLIGGKWSDAYDGKTIKVYNPATGESIVDVACMGGRETNDAISAAYDAYGSWSKTTAAERSKLLRKWYDLLMVHKEELAQLITLEQGKPLKESVGEIVYGAGFIEFAAEEAKRIYGDIVPAPFSDRRLFVLKQPVGVVGAITPWNFPLAMITRKVGPALACGCTVVIKPSELTPLTALAAVELSIQAGIPPGVVNVVMGNAPDIGDALLASPQVRKITFTGSTAVGKKLMAGSAETVKKVSLELGGNAPCIVFDDADLDVAVKGTLAAKFRNSGQTCVCANRIIVQEGIYEKFANALRDAVQNMKVGDGFSEGVSQGPLINEAAVKKVESLIHDATSKGAKVILGGKRHSLGLTFYEPTVISDVNSDMHISREEAFGPVAPLLRFKTEEEAIRIANDTNAGLGSYVFTNSIQRSWRVAEALEYGLVGVNEGVISTEVAPFGGFKQSGLGREGSKYGMDEYLEIKYVCFGNMNKE

SEQ ID NO: 12164 - protein, 234 aa, Deinococcus radiodurans
MEFFIDTAIVDEIREINAWGVLSGVTTNPSLIVASGRDFKEVIGEIAELVPGGAISAEVTALDAEGMIKEGKDVAAWHKQVVVKLPLTPAGLQACKALTSEGIKTNVTLCFSVPQALLAARAGATYVSPFVGRVDDTGWDGSELIRQIKEAFVLGDIQTKVLAASIRHPQHVVQAALAGADVATIPYKVFTQMVKHPLTQAGLDSFMADWAKRQGASPETPPSEAGTNPVKKEG

SEQ ID NO: 12165 - protein, 316 aa, Methylomonas aminofaciens
MANLFDQLKEFTTIVADTGDVEAIKSVKPYDATTNPSLLLKASTLPQYAPLIDEAIAYAKSQSGDKAQQIEDAADKLAVLIGQEILKHIPGKISTEVDARLSFDTDAMVQKGRKLIKLYADAGISKDRVLIKLASTWEGIKAGEILEKEGINCNLTLLFSFAQARACAEAGVFLISPFVGRILDWYKAKTGENYTSETDPGVLSVRKIYAYYKEHGYKTVVMGASFRNTGEITALAGCDRLTVSPNLLERAEGYRRYLPRVLVDNGATKQRPALLTEKEFRFDQNEDAMATEKLAEGIRGFVVDQNKLEKALAEKL

SEQ ID NO: 12166 - protein, 284 aa, Glycine max
MGVFSENPNPDPVVIRQVWASNLESEFQLIRELIDHYPFISMDTEFPGVVFRPHLDPTKPYNHRNNNRNRHSDHYRLLKSNVDALNLIQVGLTLTDAAGNLPDLAGNRSIWEFNFRDFDVARDAYALDSIDLLRRQGIDFARNATDGVESTRFAELMMSSGLVCNDSVSWVTFHSAYDFGYLVKILTRRNLPTRLEEFLKTVKVFFGDNVYDVKHMMRFCDTLYGGLDRVARTLNVERAVGKCHQAGSDSLLTWHAFQKIVDIYFVKDEHRKHAGVLYGLEVFC

SEQ ID NO: 12167 - protein, 392 aa, Corynebacterium glutamicum ATCC 13032
MTIDLQRSTQNLTHEEIFEAHEGGKLSISSTRPLRDMRDLSLAYTPGVAQVCEAIKEDPEVARTHTGIGNTVAVISDGTAVLGLGDIGPQASLPVMEGKAQLFSSFAGLKAIPIVLDVHDVDALVETIAAIAPSFGAINLEDISAPRCFEVERRLIERLDIPVMHDDQHGTAVVILAALRNSLKLLDRKIEDLKIVISGAGAAGVAAVDMLTNAGATDIVVLDSRGIIHDSREDLSPVKAALAEKTNPRGISGGINEAFTGADLFIGVSGGNIGEDALKLMAPEPILFTLANPTPEIDPELSQKYGAIVATGRSDLPNQINNVLAFPGIFAGALAAKAKKITPEMKLAAAEAIADIAAEDLEVGRIVPTALDPRVAPAVKAAVQAVAEAQNA

SEQ ID NO: 12168 - protein, 159 aa, Listeria monocytogenes str. 4b F2365
MNVHDFSEKAMNGKEIALSDYKGKVLLIVNTASKCGLTPQLEGLEAMYKKLGGANFEILGFPCNQFLRQDPGSDEEILEFCQMNYGVTFQMFSKIKVKGKDASPLYKYLTEQTGGKKVEWNFAKFLIDENGEVVERFPSKMKPADFEDKVEALVAKVNN

SEQ ID NO: 12169 - protein, 407 aa, Pseudomonas aeruginosa PAO1
MIGFEIFLAIGMFTAIVLGLVAIILVARAKLVSSGDVTIQINGEHSLTVPAGGKLLQTLAANNVFLSSACGGGGTCAQCKCVVVEGGGEMLPTEESHFTRRQAKEGWRLSCQTPVKQDMQIRVPEEVFGVKKWECTVESNPNVATFIKELTLRLPDGESVDFRAGGYVQLECPPHVVEYKDFDIQPEYRGDWDKFNMWRYVSKVDETVIRAYSMANYPEEKGVVKFNIRIASPPPGSDLPPGQMSSWVFNLKPGDKVTVYGPFGEFFAKDTEAEMVFIGGGAGMAPMRSHIFDQLRRLKSNRKISFWYGARSLREAFYTEEYDQLQAENPNFQWHLALSDPQPEDNWTGLTGFIHNVLFENYLKDHPAPEDCEFYMCGPPMMNAAVIKMLTDLGVERENILLDDFGG

SEQ ID NO: 12170 - protein, 618 aa, Zea mays
MDSDYGVPRELSEVQKKRALYQPEVPPCLQGTTVRVEYGDAAIAADQAGAHVISHAFPHTYGQPLAHFLRKTAVVLDAKVISEHPVVRVGIVFCGRQSPGGHNVVWGLYEAIKAHNQNSKLIGFLGGSDGLLAQRTLEITNEVLASYKNQGGYDMLGRTKDQIRTTEQVNGAMASCQALKLDALVIIGGVTSNTDAAQLAETFAEAKCATKVVGVPVTLDGDLKNQFVETTVGFDTICKVNAQLISNVCTDALSAEKYYYFIRLMGRKASHVALECALQSHPNMVILGEEVAASKLTIFDITKQICDAVQARAEKDKNHGVILIPEGLVESIPELYALLQEIHGLHGKGVSVENISSQLSPWASALFEFLPPFIRKQLLLHPESDDSAQLSQIETEKLLAQLVETEMNRRLKEGTYKGKKFNAICHFFGYQARGALPSKFDCDYAYVLGHVCYHIIAAGLNGYMATVTNVKSPVNKWRCGAAPISSMMTVQRWSRGPSATQIGKPAVHMASVDLKGKAYDVLRQNSSSFLLEDVYRNPGPLQFEGPGADSKPISLCVEDQDYMGRIKKLQEYLEKVKRIVKPGCSQDVLKAALSAMSSVTETLNIMTSSSTGQTPLSH

SEQ ID NO: 12171 - protein, 441 aa, Lotus corniculatus var. japonicus
MNQPKIKRRVGKYEVGRTIGEGTFAKVKFARNSETGEAVALKILDKEKVLKHKMAEQIKREVATMKLIKHPNVVQLYEVLGSKTKIYMVLEFVTGGELFDKIVNHGRMCEDEARRYFQQLINTVDYCHSRGVYHRDLKPENLLLDACGNLKVSDFGLSALSQQIKDDGLLHTTCGTPNYVAPEVLNDKGYDGATADLWSCGVILFVLVAGYLPFDDPNLMELYKKISAAEFTCPPWLSFSARKLITRILDPNPMTRITIAEILEDEWFKKDYKPPIFQENGETNLDDVEAVFKDSEEHHVTEKKEEQPTAMNAFELISMSKGLNLENLFDVEQGFKRETRFTSKSPANEIISKIEEAAKPLGFDVQKKNYKMRLANVKAGRKGNLNVATEVFQVAPSLHMVEVRKAKGDTLEFHKFYKKLSTCLEDVVWKTEDDMQKQEAK

SEQ ID NO: 12172 - protein, 212 aa, Oryza sativa (japonica cultivar-group)
MRTGEVAEAVPRVVAILSSLLQRVAERNDAAAAAAAVGEEAAAVSAFQGLTKPAISIGGYLERIFRFANCSPSCYVVAYIYLDRFLRRRPALAVDSFNVHRLLITSVLTAVKFVDDICYNNAYFARVGGISLMEMNYLEVDFLFGIAFDLNVTPAAFASYCAVLQSEMTYLEQPPAVDLPRLHCCPSDQDDAGCHHKQQQQQQQQQQHQLAV

SEQ ID NO: 12173 - protein, 467 aa, Glycine max
  misc_feature (90)..(90): Xaa can be any naturally occurring amino acid
  misc_feature (213)..(213): Xaa can be any naturally occurring amino acid
MEQKGGVLMQRYELGRLLGQGTFAKVYHARNIITGMSVAIKIIDKEKILKVGMIDQIKREISVMRLIGHPHVVELYEVMASKTKIYFVMXHEKGGELFNKVFKGKLKEDDARKYFQQLISAVDYCHSSGVCHRDLKPENLLLDENENLKVTDLGLSALAESKCQDGLLHTTCGTPAYVAPEVINRRGYDGIKADIWSCGVILYVLLAGHLPFXNTNLMEMYRKIGRGEFKFPKWFAPDVRRFLSKILDPNPKARISMAKIMESSWFKKGLEKPTITQNEDEELAPLDADGVFGACENGDPIEPAKNSKPCNNLNAFDIISYSSGFDLSGLFEETDRKKEERFTSDKPASIIISKLEEICRRLRLKVKKKDGGLFKLEGSKEGRKGPLGIDAEIFEITPVFHLVELKKSSGDTLEYQKLLKQEVRPALKDIVWNWQGEQPQPLQHGVVQKEEQPSYPGISEVVPQSTA

SEQ ID NO: 12174 - protein, 176 aa, Triticum aestivum
  misc_feature (124)..(124): Xaa can be any naturally occurring amino acid
MAPTVMASSATSVAPFQGLKSTAGLPVSRRSSSAGLGSVSNGGRIRCMQVWPIEGIKKFETLSYLPPLSTEALLKQVDYLIRSKWVPCLEFSKVGFVFREHNSSPGYYDGRYWTMWKLPMFGCXTDATQVLNEVEEVKKEYPDAYVRVIGFDNLRQVQCVSFIAFRPPGCEESGKA

SEQ ID NO: 12175 - protein, 294 aa, Saccharomyces cerevisiae
TTPLVHVASVEKGRSYEDFQKVYNAIALKLREDDEYDNYIGYGPVLVRLAWHTSGTWDKHDNTGGSYGGTYRFKKEFNDPSNAGLQNGFKFLEPIHKEFPWISSGDLFSLGGVTAVQEMQGPKIPWRCGRVDTPEDTTPDNGRLPDADKDADYVRTFFQRLNMNDREVVALMGAHTLGKTHLKNSGYEGPWDATNNVFDNSFYLNLLNEDWKLEKNDANNEQWDSKSGYMMLPTDYSLIQDPKYLSIVKEYANDQDKFFKDFSKAFEKLLENGITFPKDAPSPFIFKTLEEQGL

SEQ ID NO: 12176 - protein, 430 aa, Pneumocystis carinii
MVEKARTFKTLNPQTMFSTQLIPLNKKFSENGGHITSSFYIHRGYPKHYKFKSLEYVGVSFHYHHQRRGHLEFNITSPSGVTSVLAHRRNRDKHGGSILWTFMTVKHWYFVSFCKIITNDFRGESIVGNWTIDVEDKKDENLDGGVFDWQLHFFGESCESEGVPPPSYPFLSRYPTTTPPPDPDATPSPDLDANLQPDSNADSQPQPDVKPLPSLDIEPQPPSEPDPNPPSYPSSQQDPDTSLSSNPTSTSSSEPPPPPPPRPEPQPQPETQPETQPPQPPQPPQPPQSETQPETQPEPEPEPRPEPEPEPEPEPQPPQSVPQPPQPETQPEPQPEPPASPPKLQPEQKPTSITSSTSTTSSTSTTSSSKTKISTTRKASCTITVFIGPSPTEGVSTGSSVSHLSFFEKRHLLLQMILLLFFFLFLGYSF

SEQ ID NO: 12177 - protein, 292 aa, Leuconostoc mesenteroides subsp. mesenteroides ATCC 8293
MDYKTLASGIEMPLLGFGVFQVQEKGAAKQAVLDAIKTGYRLIDTAASYGNEREVGEAILEAINQGIVKREELFVTSKMWVQDVSAQQATAAIQSSLQRLNLDYLDLYLIHQPYNDVFGAWRAMESAYRSGQLKAIGVSNFDIAQLTNLAEFSDIKPMLNQIEVNPFQQNKKDITYFSQYGVQVEAWAPFAEGKNDLFSNILLRKIADKHHKSIAQIVLRWLTQRNIIVVAKSVKPERMAQNLDIFDFKLTHQELAEIETLDTNSSQFFNHADPDMIKWMANREISYDVTFN

SEQ ID NO: 12178 - protein, 489 aa, Photorhabdus luminescens subsp. laumondii TTO1
MRIQNKMLINGDWIDASDGQTIEVMNPHDGSLITRVAEAKEADVDCAVAAAKAAYPAWGRLQASERGALLLKLADKIEEHAAELAQLETMDTGHPIRDTLNIDVPRTAYCFRYFGGMADKLEGSVIPVEEGFLNYTTREPIGVVGQIVPWNFPLMFTSWKMAPALAAGNTIVIKPSEITPLSTLRIAELMMEVGFPPGVINVVVGYGNSAGARLSEHEDVGKIAFTGSTMTGQSIVAASAGNLKKVQLELGGKGANIIFEDADLTKAVGGSAWAIFHNQGQACIAGSRIILHESIADAFLEKFLTLAGSIRLGDPLLPETEMGPVTSLQHRERVLAYCDVARSQGCEILLGGKPPADPALANGCYIEPTVVRAKYSDRIAQEEVFGPFVTVITFKNDEEALAIANSTEYGLGSGLWTKDISRAHRFARDMHAGMVWINCYKRVNPASPFGGVGRSGYGREMGFEVMREYTQVKSVWVNVDAKIPPFYQR

SEQ ID NO: 12179 - protein, 135 aa, Triticum aestivum
MCPIKKEMSGESGSPCSGENFYSPSTSREHQQAKQAAWTSAPAKRPAGRTKFRETRHPVYRGVRRRGNAGRWVCEVRVPGRRGSRLWLGTFDTAEAAARANDAAMIALSAGGAGCLNFADSAELLAVPAASSYRS

SEQ ID NO: 12180 - protein, 279 aa, Lactobacillus johnsonii NCC 533
MATIQWYPGHMNKAKNQLEDNLDLIDVLIEVLDARLPVSSRNPMIGQLTKKKPHIIVLNKADLADPIQTKKWTHYYQDEGNFVISMDAQHTTNMTSLFKIIKLAGKEKTDKLIAKGASNPMIRVAIAGIPNCGKSTIINRMVGRNAAIVGDKPGVTRGQSWLKTKTNVQILDTPGILWPKFSDQEVGYKLAACGAIKADIFHPDDVALFVIEFLKQNYRDDLVKFARISSEEMDSMSNPDLLLAMTNKYGMRDDYDKFSLFMLQRLRKGKLGRITFDLR

SEQ ID NO: 12181 - protein, 102 aa, Triticum aestivum
MGERVKGTVKWFNVTKGFGFISPDDGGEDLFVHQSAIKSDGYRSLNENDAVEFEIITEDSKARWFIICSQLMEERPHSQEEEIVDADRLSEHTLSSRFGSSV

SEQ ID NO: 12182 - protein, 365 aa, Glycine max
  misc_feature (98)..(98): Xaa can be any naturally occurring amino acid
MGSTGETQITPTHVSDEEANLFAMQLASASVLPMILKSALELDLLEIIAKAGPGVHLSPTDISSQLPTQNPDAPVMLDRILRLLACYNILSFSLRNSXDGKVERLYGLAPVAKYLVKNEDGVSIAALNLMNQDKVLMESWYYLKDAVLEGGIPFNKAYGMTAFEYHGTDPRFNKVFNKGMADHSTITMKKILETYTGFEGLKSLVDVGGGTGAVVNMIVSKHPTIKGINFDLPHVIEDAPSYPGVEHVGGDMFASVPKADAIFMKWICHDWSDEHCLKFLKNCYEALPDNGKVIVAECILPVAPDSSLATKGVVHIDVIMLAHNPGGKERTEKEFEALAKGSGFQGFRVLCCAFNTYVMEFLKKV

SEQ ID NO: 12183 - protein, 183 aa, Escherichia coli CFT073
MQDSILTTVVKDIDGEVTTLEKYAGNVLLIVNVASKCGLTPQYEQLENIQKAWADRGFVVLGFPCNQFLEQEPGSDEEIKTYCTTTWGVTFPMFSKIEVNGEGRHPLYQKLIAAAPTAVAPEESGFYARMVSKGRAPLYPDDILWNFEKFLVGRDGKVIQRFSPDMTPEDPIVMESIKLALAK

SEQ ID NO: 12184 - protein, 301 aa, Solanum tuberosum
MVSNYISATVSSILLFLLCSSSLFGASMAALVQEQPLVLKYHNGALLKGTVTVNLIWYGKFTPIQRSIIVDFLQSLNSPKAPNPSAASWWKTTEKYKTGASTVTLGKQILDENCSLGKSLKNSHIVYLASKGGYMGRSVNLVLTAKDVFVEGFCSRCGSHGSTRGKVRFTYAWVGNSETQCAGQCAWPFHQPIYGPQTPPLLAPNGDVGVDGMIINVATVLAGTVTNPFNNGYFQGPATAPLEAVSACTGMFGSGSYPGYPGQTLVDKSTGASYNAHGVNGRRFLLPAMWDPTKSACSALV

SEQ ID NO: 12185 - protein, 429 aa, Burkholderia cepacia R18194
MSNYLNSTEAAARLGVSRQTLYAYVSRGLLRAEPGSSHRESRYLAADVDRLADQRARGHKPKEVAKAALNWGSPVLESSITLIDGGRLFYRGVDALELATRASLEDVAALLWRCDEQTAFGRRVPTTPSVLRTLFRHYDNQRAEQALLPLFTVASEDAPTAIWHQSADRHAQGCGDLVRILAACLLRTRIDTAPIHEQCARAWGVGPAGAELIRMALVLCADHELNASSFTGRCIASTNASLRAVVVGGLAGLSGERHGAATARGEALWDELGNKDVEQKMGERLARGDGLPGFGHALYPDGDVRATYLLSRILPRHPQWKRMIDAGSALVGQKPSLDLALVALRRHLRLPVGAAFGLFALGRSIGWIAHGLEQREQSDLIRPRAVYTGTWPDGAGADHARSRGRSGKQQTTQAAAPKDDMLAAFFRNR

SEQ ID NO: 12186 - protein, 380 aa, Vibrio vulnificus CMCP6
MPSSLTKKGELGGAGLRGQSAGSTALCTVGKTGTGLTYRGYDITDLANHAQFEEVAYLLLRGHLPTQQELDAYKTRLIGLRGLPVELKQALELIPASAHPMDVMRTGCSVLGNLEQETDFSQQLDATERMLALFPAIICYWYRFSHDGVRIDTQDQSQDCIGGYFLKMLTGKEPSELHKQVMHCSLILYAEHEFNASTFAARVCASTLSDIHSCVTAAIGTLRGPLHGGANEAAMEMIENWQTPEEAESNILRMLANKEKIMGFGHAIYRESDPRNALIKRWSKALSEAVGDTHLYAVSERVEAVMKREKDLFCNADFFHASAYHFMDIPTKLFTPIFVMSRLTGWTAHVFEQRANNRIIRPSADYIGPDHQDWVPIEQR

SEQ ID NO: 12187 - protein, 462 aa, Erwinia pyrifoliae
  misc_feature (354)..(354): Xaa can be any naturally occurring amino acid
  misc_feature (381)..(381): Xaa can be any naturally occurring amino acid
MMKNVSSAVAVSRNPATGEVFARYPFATIAEVDSALALTNGAFQYWRHSAMSDRVQLLCNVADALRQQARELAEMMTSEMGKPVDQGLAEVEKSARLCEWYAGHGPAFLQREPTLVEGNKAFVDYLPLGPVLSVMPWNFPVWQVLRGAVPILLAGNSYLLKPAPNVMGCALLLQQILTRVGVPEGLFAVVNADNDGVAQAINDRRIAAVTVTGSVRAGAAIAALSGAAIKKCVLELGGSDAFIVLADADIDAAVKGAIAGRFMNNGQLCISAKRIIVEAPVFDAFRDKFVSAVKEMKIGDPRESGTWIGPMARYDLRDELDSQVQATLKEGATLLLGGHVLPGEGNYYAPTVLXDVKPGMTSFAQELFGPVASLIQADNAXHAVAMANDSEFGLGGSMWSRDLAVAQKLASRIETGGVFINSPSFSDPRVPIGGVKKSGFGRELSHFGLREFTNTQTVWMEE

SEQ ID NO: 12188 - protein, 340 aa, Atropa belladonna
MAFRNGSTTTTITTINHPNDASTIPKNGTNITTTLLKNGSTNEFGCIKPGWFSEFSQLWPGEAFSLKIEKLLFQGKSDYQDVMLFESATYGKVLTLDGAIQHTENGGFPYTEMIVHLPLGSIPSPKKVLIIGGGIGFTLFEVFRYPTIENIDIVEIDNVVVDVSRKFFPYLAAGFDDPRVTLVLGDGAAFVKAAQAGYYDAIIVDSSDPIGPAKDLFERPFFEAVAKALRPGGVVCTQAESIWLHMHIIKQIIDNCRQVFKGSVNYAWTTVPTYPTGVIGYMLCSTKGPQVDFRNPVNPIDKKTSHIKSKGPLKFYNSDIHKAAFILPSFARNLMESELD

SEQ ID NO: 12189 - protein, 448 aa, Lotus corniculatus var. japonicus
MVLRKVGKYEIGRTIGEGTFAKVKFAQNTETGESVAMKVLDRNTIIKHNMVDQIKREISIMKLVRHPYVVRLYEVLASRTKIYIILEFITGGELFDKIIRHGRLSEAESRRYFQQLIDGVDYCHSKGVYHRDLKPENLLLDSLGNIKISDFGLSALPEQGVSILRTTCGTPNYVAPEVLSHKGYNGAVADVWSCGVILYVLLVGYLPFDELDLTSLYSKIEKAEYSCPPGFPVGAKTLIHKILDPNPETRITIEQIRNDEWFQRGYVPVSLLEYEDVNLDDVNAVFDDAEEQRANQQCDHEDMGPLMLNAFDLIILSQGLNLAAIFDRGQDSMKYQTRFITQKPAKVVLSSMEVVAQSMGFKTHIRNYKMRVEGLSAKKTSHFSVMLEIFEVAPTFYMVDIQKAAGDAGEYLKFYKNFCGNLEDIIWKPPHESTKSKVSKTRSKRRSR

SEQ ID NO: 12190 - protein, 205 aa, Glycine max
  misc_feature (110)..(110): Xaa can be any naturally occurring amino acid
  misc_feature (112)..(112): Xaa can be any naturally occurring amino acid
  misc_feature (120)..(121): Xaa can be any naturally occurring amino acid
  misc_feature (123)..(124): Xaa can be any naturally occurring amino acid
  misc_feature (126)..(126): Xaa can be any naturally occurring amino acid
  misc_feature (129)..(131): Xaa can be any naturally occurring amino acid
  misc_feature (133)..(133): Xaa can be any naturally occurring amino acid
  misc_feature (142)..(142): Xaa can be any naturally occurring amino acid
MATYSWSTEIFSFLVLTLLSTSSHTMVAGARNLLESTLSKPEVPTLPKPHELPPLPEIPELPKFESPKIPALPKPELPKVPELSKPDMSKVPELPKVPERLKVPEISKIXEXPKPELPKXXEXXKXELXXXPXIPKVPEFPXPELPKVPEVPKPELSKVPKLPKSELPKVPEIPELPKSELPKIPEIPKVPEFPKVPKAFSTTNP

SEQ ID NO: 12191 - protein, 338 aa, Hyoscyamus niger
MEVISNHNNGSTTKIILKNGSICNGNVNGNSHSNEKTENKLVECTNSIKPGWFSEFSALWPGEAFSLKIEKLLFQGKSDYQDVMLFESATYGKVLTLDGAIQHTENGGFPYTEMIVHLPLGSIPSPKKVLIIGGGIGFTLFEVSRYSTIEKIDIVEIDDVVIDVSRKYFPYLAAGFDDPRVTLIVGDGAAFVKAAQPGYYDAIIVDSSDPIGPAKDLFERPFFEAVTKALRPGGVVCTQAESIWLHMHLIKQIIANCRQVFKGSVNYAWTTVPTYPTGVIGYMLCSTEGPEVNFKNPVNSIDKDTTHVKSKGPLKFYNSDIHKAAFILPSFARDLVEF

SEQ ID NO: 12192 - protein, 376 aa, Halobacterium sp. NRC-1
MSDELKKGLEDVLVAESDLSFIDGDAGKLVYCGYAIEDLARTASYEEVLYLLWHGDLPTRSELDAFRADMASHREIDDDVLALVENLAAADADPMAALRTAASALSAHDDTAGGSDPDDARESGKRITAKLPTIVAAFTRLRNGDDVVAPRDDLGHAANFLYMLNGEAPDDVLADVFDQALVLHADHGLNASTFSGMVTASTLADVHAAVTSAIGTLSGSLHGGANANVMRMLKEVDDSDKDPLSWVQDALANGERVMGFGHRVYNVKDPRAHILSERSEELGAAAGDTKWYEMSVAIEDYMADEKGLAPNVDFYSASTYYQMGIPVDIYTPIFAMSRVGGWVGHVLEQYDDNRLIRPRARYVGAEDRDSTPLDER

SEQ ID NO: 12193 - protein, 336 aa, Atropa belladonna
MEVNHNNGSTTKIILKNGSICNGDVNGNSHTHKKIENKLVECTNSIKPGWFSEFSALWPGEAFSLKIEKLLFQGKSDYQDVMLFESATYGKVLTLDGAIQHTENGGFPYTEMIVHLPLGSIPSPKKVLIIGGGIGFTLFEVSRYPTIDTIDIVEIDDVVVDVSRKYFPYLAAGFDDPRVTLIIGDGAAFVKAAQPGYYDAIIVDSSDPIGPAKDLFERPFFEAVAKALRPGGVVCTQAESIWLHMHLIKQIIANCRQVFKGSVNYAWTTVPTYPTGVIGYMLCSTEGPEVNFKNPVNSIDKDTSHVKSKGPLKFYNSDIHKAAFILPSFARDLVEF

SEQ ID NO: 12194 - protein, 377 aa, Candida albicans SC5314
MSADGEFTRTQIFGTVFEITNRYTELNPVGMGAFGLVCSAVDRLTGQNVAVKKVMKPFSTSVLAKRTYRELKLLKHLKHENLITLDDIFISPLEDIYFVNELQGTDLHRLLNSRPLEKQFIQYFTYQIMRGLKYIHSAGVIHRDLKPSNILINENCDLKICDFGLARLQDPQMTGYVSTRYYRAPEIMLTWQKYDTEVDLWSVGCILAEMIEGKPLFPGKDHVHQFSIITELLGSPPADVIDTICSENTLRFVQSLPHRDPIPFSERFASCTHVEPEAIDLLAKLLVFDPKKRISAVEGLTHPYMEAYHDPTDEPVCESKFDWSFNDADLPVDTWRVMMYSEILDFHQTVGVANETEGSEQPDSQVEQNNLDSANGA

SEQ ID NO: 12195 - protein, 161 aa, Oryza sativa (japonica cultivar-group)
MQEEFQLALFKNKRKENLFANRIFDLFDVKKRGVIDFGDFVRALNVFHPNIPMEEKIDFSFKLYDMDNTGFIERKEVKQMLIALLGESEMRLSDEIIETILDKTFSDADTNQDGRIDRTEWENFVSRNPSLLKIMTLPYLKDITTTFPSFVFNSEVDDLVT

SEQ ID NO: 12196 - protein, 406 aa, Zea mays
  misc_feature (54)..(54): Xaa can be any naturally occurring amino acid
MASNGCNGNGNGNGNGKAAPAGVVVPEIKFTKLFINGEFVDAASGKTFDTRDPXYQGYTLKEPIGVVGVIIPWNFPTMMFFLKVSPALAAGCTVVVKPAEQTPLSALYYAHLAKMAGVPDGVINVVPGFGPTAGAALASHMDVDSVAFTGSTEVGRLIMESAARSNLKTVSLELGGKSPLIIFDDADVDMAVNLSRLAVFFNKGEVCVAGSRVYVQEGIYDEFVKKAVEAARSWKVGDPFDVTSNMGPQVDKDQFERVLKYIEHGKSEGATLLTGGKPAADKGYYIEPTIFVDVTEDMKIAQEEIFGPVMSLMKFKTVDEVIEKANCTRYGLAAGIVTKSLDVANRVSRSVRAGTVWVNCYFAFDPDAPFGGYKMSGFGRDQGLAAMDKYLQVKSVITALPDSPWY

SEQ ID NO: 12197 - protein, 500 aa, Zea mays
MSSSPSFGLLAVAALLLALSLAQHGSLAATVGPRVIVVGAGMSGISAAKRLSEAGITDLLILEATDHIGGRMHKTNFAGINVELGANWVEGVNGGKMNPIWPIVNSTLKLRNFRSDFDYLAQNVYKEDGGVYDEDYVQKRIELADSVEEMGEKLSATLHASGRDDMSILAMQRLNEHQPNGPATPVDMVVDYYKFDYEFAEPPRVTSLQNTVPLATFSDFGDDVYFVADQRGYEAVVYYLAGQYLKTDDRSGKIVDPRLQLIKVVREIKYSPGGVTVKTEDNSVYSADYVMVSASLGVLQSDLIQFKPKLPTWKVRAIYQFDMAVYTKIFLKFPRKFWPEGKGREFFLYASSRRGYYGVWQEFEKQYPDANVLLVTVTDEESRRIEQQSDEQTKAEIMQVLRKMFPGKDVPDATDILVPRWWSDRFYKGTFSNWPVGVNRYEYDQLRAPVGRVYFTGEHTSEHYNGYVHGAYLSGIDSAEILINCAQKKMCKYHVQGKYD

SEQ ID NO: 12198 - protein, 426 aa, Lotus corniculatus var. japonicus
GRVLGQGNFAKVYHGRNLATNENVAIKVIKKEKLKKDRLVKQIKREVSVMRLVRHPHIVELKEVMATKGKIFLVMEYVKGGELFTKVNKGKLNEDDARKYFQQLISAVDFCHSRGVTHRDLKPENLLLDENEDLKVSDFGLSALPEQRRDDGMLVTPCGTPAYVAPEVLKKKGYDGSKADIWSCGVILYALLSGYLPFQGENVMRIYRKAFKAEYEFPEWISPQAKNLISNLLVADPEKRYSIPEIISDPWFQYGFMRPLAFSMKESAVGEDSTIDHFGGEEEEVPELVAAMGKPARPFYNAFEIISSLSHGFDLRSLFETRKRSPSMFISKYSASAVVAKLEGMAKKLNFRVTGKKEFTVRMQGMKEGRKGKLAMTMEVFEVAPEVAVVEFSKSAGDTLEYVKFCEEQVRPSLKDIVWSWQGDSN

SEQ ID NO: 12199 - protein, 291 aa, Saccharomyces cerevisiae
LVHVASVEKGRSYEDFQKVYNAIALKLREDDEYDNYIGYGPVLVALAWHISGTWDKHDNTGGSYGGTYRFKKEFNDPSNAGLQNGFKFLEPIHKEFPWISSGDLFSLGGVTAVQEMQGPKIPWRCGRVDTPEDTTPDNGRLPDADKDAGYVRTFFQRLNMNDREVVALMGAHALGKTHLKNSGYEGPWGAANNVFTNEFYLNLLNEDWKLEKNDANNEQWDSKSGYMMLPTDYSLIQDPKYLSIVKEYANDQDKFFKDFSKAFEKLLENGITFPKDAPSPFIFKTLEEQGL

SEQ ID NO: 12200 - protein, 427 aa, Escherichia coli O157:H7
MADTKAKLTLNGDTAVELDVLKGTLGQDVIDIRTLGSKGVFTFDPGFTSTASCESKITFIDGDEGILLHRGFPIDQLATDSNYLEVCYILLNGEKPTQEQYDEFKTTVTRHTMIHEQITRLFHAFRRDSHPMAVMCGITGALAAFYHDSLDVNNPRHREIAAFRLLSKMPTMAAMCYKYSIGQPFVYPRNDLSYAGNFLNMMFSTPCEPYEVNPILERAMDRILILHADHEQNASTSTVRTAGSSGANPFACIAAGIASLWGPAHGGANEAALKMLEEISSVKHIPEFVRRAKDKNDSFRLMGFGHRVYKNYDPRATVMRETCHEVLKELGTKDDLLEVAMELENIALNDPYFIEKKLYPNVDFYSGIILKAMGIPSSMFTVIFAMARTVGWIAHWSEMHSDGMKIARPRQLYTGYEKRDFKSDVKH

SEQ ID NO: 12201 - protein, 215 aa, Methanococcus maripaludis S2
MKFFLDTANVEKIKEFNALGLVDGVTTNPSLIKKEGRDFYEVIKEICSIVDGPVSAEVIALDSEGMVKEARELVKLAENVVVKIPMTKEGMKAVNILSKEGIKTNVTLIFSANQALLAAKAGASYVSPFVGRLDDVGQDGMFLISEVMQVFGAYGIETEVIVASVRHPIHVLESAKMGADIATIPFDVLDKLFNHPLTDNGIAKFLSDWEAHMNR

SEQ ID NO: 12202 - protein, 160 aa, Zea mays
MDARMFGLENPLVAALHHLLDVPDGDAGAGGDKAGGGATRTYVRDARAMAATPADVKELAGAYAFVVDMPGLSTGDIRVQVEDERVLVISGERRREEREDAKYLRMERRMGKFMRKFVLPDNADVDKVAAVCRDGVLTVTVEKLPPQEPKKPKTIEIKVA

SEQ ID NO: 12203 - protein, 502 aa, Zea mays
MATANGSSKGSFEVPKVEVRFTKLFIDGKFVDAVSGKTFETRDPRTGEVIASIAEGGKADVDLAVKAAREAFDNGPWPRMTGYERGRILHRFADLIDEHVEELAALDTVDAGKLFAVGKARDIPGAAHLLRYYAGAADKVHGATLKMAQRMHGYTLKEPVGVVGHIVPWNYPTTMFFFKVGPALAAGCAVVVKPAEQTPLSALFYAHLAREAGVPAGVLNVVPGFGPTAGAAVAAHMDVDKVSFTGSTEVGRLVMRAAAESNLKPVSLELGGKSPVIVFDDADLDMAVNLVNFATYTNKGEICVAGTRIYVQEGIYDEFVKKAAELASKSVVGDPFNPSVSQGPQVDKDQYEKVLRYIDIGKREGATLVTGGKPCGDKGYYIEPTIFTDVKDDMTIAQDEIFGPVMALMKFKTVEEVIQKANNTRYGLAAGIVTKNIDVANTVSRSIRAGAIWINCYFAFDPDAPFGGYKMSGFGKDMGMDALDKYLQTKTVVTPLYNTPWL

SEQ ID NO: 12204 - protein, 102 aa, Brassica napus
  misc_feature (21)..(21): Xaa can be any naturally occurring amino acid
SPSSSSSDDVAAPLLPKSHGXDEVAYDEFNGASFSGAVFNLATTIIGAGIMALPATMKILGLVLGIAMIVVMAFLTDASIEFLLRFSKIKRSRSYGGLMGDS

SEQ ID NO: 12205 - protein, 178 aa, Glycine max
  misc_feature (115)..(115): Xaa can be any naturally occurring amino acid
MASSMISSPAVTTVNRAGAGMVAPFTGLKSMAGFPTRKTNNDITSIASNGGRVQCMQVWPPVGKKKFETLSYLPDLDDAQLAKEVEYLLRKGWIPCLEFELEHGFVYREHNRSPXYYDGRYWTMWKLPMCGYTDAAQILNKLQYANTTYPNSFIRIIIFHNIPQIQCISLITYKHPSF

SEQ ID NO: 12206 - protein, 119 aa, Triticum aestivum
MSAVNITNVAVLDNPTAFLNPFQFEISYECLVPLDDDLEWKLTYVGSAEDETYDQQLESVLVGPVNVGTYRFVFQADPPDPLKIREQDIIGVTVLLLTCSYVGQEFMRVGYYVNNDYDE

SEQ ID NO: 12207 - protein, 117 aa, Streptococcus constellatus subsp. pharyngis
MTKIYDFSIFDQNNRSISLEIYKGNVLLIVNTATGCGLTPQYKGLQHLYTRYQNQGFEILDFPCNQFMGQAPGTAEEINRFCSLHYQTTFPRFAKVKVNGKEADPLYIWLKEQQAGP

SEQ ID NO: 12208 - protein, 505 aa, Xanthobacter autotrophicus
MNKPEIAITKQSPFKARYGNFIGGKFVEPVGGRYFDNTSPVTGGKICEIARSDADDIEKALDAAHAAKDAWGKTSAAVRALILNRIADRMEENLDLLALAETWDNGKPIRETTAADMPLAIDHFRYFAGAVRAQEGGISEIDHDTVAYHFHEPLGVVGQIIPWNFPILMAVWKLAPALAAGNCVVLKPAEQTPASILVLAELIADLLPPGVLNIVNGFGLEAGKPLASSSRIAKIAFTGETTTGRLIMQYASQNLIPVTLELGGKSPNIFFADVVAEDDDFFDKAVEGFVMFALNQGEVCTCPSRALIQESIYDRFMEKALKRVAAIVQGSPLDPATMIGAQASSEQLEKILSYIDIGKQEGAEVLIGGERNTFGGDLAGGYYVKPTVFKGHNKMRIFQEEIFGPVVSVTTFTDDAEALHIANDTLYGLGAGVWTRDGNRAYRFGRAIQAGRVWTNCYHAYPAHAAFGGYKQSGIGRENHKMMLDHYQQTKNMLVSYSPKKLGFF

SEQ ID NO: 12209 - protein, 148 aa, Triticum aestivum
  misc_feature (25)..(25): Xaa can be any naturally occurring amino acid
MEGRMFGLETPLMAALQHLLDIPDXPTRAYVRDARAMAATPADVKELPGAYAFVVDMPGLGSGDIKVQVEDERVLVISGERSREEEEDPKYLRMEPRMGKLMRKFVLPENADMEKISPACRDGVLPVPVEKLPPPEPKKPKPIQVQVA

SEQ ID NO: 12210 - protein, 146 aa, Rosa hybrid cultivar 'Vivaldi'
DATTHKFKGKTVMTESERYESLRHCKWVDEVIPDAPWVVNEEFLDKHNIDYVAHDSLPYADASGAGKDVYEFVKAVGRFKETKRTEGISTSDIIMRIVKDYNQYVLRNLDRGYTRKELGVSFVKEKRLRVNMRVKKLQEKVKEKKK

SEQ ID NO: 12211 - protein, 112 aa, Bartonella vinsonii subsp. berkhoffii
ANEACLKMLLEIGSVKRIPEFIARAKDKNDPFRLMGFGHRVYKNYDPRAKIMQKTCHEVLKELNIQNDPLLDIAIELEKIALNDEYFVEKKLYPNVDFYSGITLKALGFPTE

SEQ ID NO: 12212 - protein, 416 aa, Escherichia coli
MESKVVVPAQGKKITLQNGKLNVPENPIIPYIEGDGIGVDVTPAMLKVVDAAVEKAYKGERKISWMEIYTGEKSTQVYGQDVWLPAETLDLIREYRVAIKGPLTTPVGGGIRDLNVALRQELDLYICLRPVRYYQGTPSPVKHPELTDMVIFRENSEDIYAGIEWKADSADAEKVIKFLREEMGVKKIRFPEHCGIGIKPCSEEGTKRLVRAAIEYAIANDRDSVTLVHKGNIMKFTEGAFKDWGYQLAREEFGGELIDGGPWLKVKNPNTGKEIVIKDVIADAFLQQILLRPAEYDVIACMNLNGDYISDALAAQVGGIGIAPGANIGDECALFEATHGTAPKYAGQDKVNPGSIILSAEMMLRHMGWTEAADLIVKGMEGAINAKTVTYDFERLMDGAKLLKCSEFGDAIIENM

SEQ ID NO: 12213 - protein, 506 aa, Xanthobacter autotrophicus
MNSPAFLSSAHTSPFKPRYGNFIGGTFVEPVSGRYFENTSPITGKVICEVPRSDEHDIERALDAAHAAKKAWGRTSAADRALVLLKIADRLEANLELLAGAETWDNGKPIRETTLADIPLAIDHFRYFAACVRAQEGTLGEIDHDTIAYHYHVPLGVVGQIIPWNFPILMAAWKLAPALGAGNCVVLKPAEQTPASILVLAELIADLLPPGVLNIVNGFGLEAGKPLASSPRISKIAFTGETGTGRLIMGYAAQNLIPVTLELGGKSPNIFFADVAAEDDDFLDKAVEGFVMFALNQGEVCTCPSRALVQESIFDKFMEKALARVAAIKQGSPLDPSTMIGAQASSEQMHKILSYIDIGRAEGAQVLAGGERNVLTGELADGFYVKPTVFLGKNNMRIFQEEIFGPVVSVTTFKDEEEALHIANDTLFGLGAGLWTRDGSRAYRVGREIEAGRVWTNCYHAYPAHAAFGGYKQSGIGRETHKMMLDHYQQTKNLLVSYSPKKLGFF

SEQ ID NO: 12214 - protein, 327 aa, Fusobacterium nucleatum subsp. vincentii ATCC 49256
MEIEKMEKKLAILTSGGDAPGMNAAIRATAKIAESYGFEVYGIRRGYLGMLNDEIFPITGRFVSGIIDKGGTVLLTARCEEFKQARFREIAANNLKKKGIEYLVVIGGDGSYRGANLLYKEHGIKVVGIPGTIDNDICGTDFTLGFDTCLNTILDAMSKIRDTATSHERTILIQVMGRRAGDLALHACIAGGGDGIMIPEMDNPIEMLALQLKERRKNGKLHDIVLVAEGVGNVFEIEEKLRGHINSEIRSVVLGHIQRGGTPSGRDRVLASRMAAKAVEVLSKGEAGVMVGIEKNEMVTHTLEKACSVEKRKSIEKDYELALLLSK

SEQ ID NO: 12215 - protein, 327 aa, Triticum aestivum
MASRTAAVPEVALRSGDARPMPAIGMGTAQSPVVPDTTVKAVLEAVEVGYRHFDTASMYATERPLGEALAEAVRRGLLASREEVFVTSKLWCTQCHPHLVLPSLQESLQNLQMEYVDLYLIHWPISLKPGPVVFPVKREDAVPFDLEGVWRAMEECHRLGLAKAIGVSNFTTRHLDKLLPAATVPPAVNQVEMNPVWQQRKLREYCAEKGIHVAAYSPLGGQNWSGDGNAVLDSEVLAEIAKARGKSVAQVALRWIYEQGVTPIVKSFSKERLKENLGIFDWGLTDDDLRKIGQIPQKKIVKAETVLFSAEGEFTSADLADMEIVED

SEQ ID NO: 12216 - protein, 483 aa, Zea mays
MANNSSYGENARRKPHTPSAIVIGGGFAGLAAADALRNASFQVILLESRDRIGGRVHTDYSFGFPVDLGASWLHGVCEENPLAPIIGRLGLPLYRTSGDDSVLFDHDLESYALYDTNGRQVPQELVEKLGKVFEKILEETGKLREEINEDMSIAKAIAIVMARNPHLRQEGIAHEVLQWYLCRMEGWFATDADSISLQGWDQEVLLPGGHGLMVRGYRPVINTLAKGLDIRLNHKVVEIVRHRNRVEVTVSSGQTFVADAAVVTVPLGVLKAKTIRFEPRLPEWKEEAIRELTVGVENKIVLHFGQVFWPNVEFIGVVSSSTYGCSYFLNLHKATGHPVLVYMPAGRLARDIEKTSDEAAAQFAFSQLKKILPNAAEPINYLVSRWGSDENTLGSYTFDGVNKPRDLYEKLRIPVDNLFFAGEATSVKYTGTVHGAFSTGVMAAEECKMRVLERFRELDMLEMCHPAMGEDSPVSVPLLISRL

SEQ ID NO: 12217 - protein, 139 aa, Ustilago maydis 521
MSSGVKVSQECLDKFQELKLGKKIKYIIYSLNDKNTEIVVQNTSTSTSYDDFLAELPPTECRYAIYDFEYEKGDAGKRNKICFFSWSPDDAKIKPKMVFASSKDALRKALVGISTEIQGTDFSEVSYDTVLDKVSRSTF

SEQ ID NO: 12218 - protein, 135 aa, Haloarcula marismortui ATCC 43049
MSDRDPFSEIERAFDMLGEQFGVDMGAIPVDVLDKGDAFLVHADLPGYDSEDIDVQLVEDRKLTISATSSQERESTDGQYVQRERRQQSLSRSVRLPEAVDDGETTASYDSGVLTVRLAKVGHNEDDDGTDIPVN

SEQ ID NO: 12219 - protein, 397 aa, Lotus corniculatus var. japonicus
LKKERLVKQIKREVSVMRLVRHPHIVELKEVMATKTKIFMVVEYVKGGELFAKLTKGKMTEVAARKYFQQLISAVDFCHSRGVTHRDLKPENLLLDDNEDLKVSDFGLSSLPEQRRSDGMLLTPCGTPAYVAPEVLKKKGYDGSKADIWSCGVILYALLCGYLPFQGENVMRIYSKSFKADYAIPEWISPEAKNLISKLLVVDPEKRYSIDEIMRDPWFEIGFMRPLAFSMKASAVDDTVIDFNDDVVEDLDPKSDVGGGEFVEAARPSYNAFEIISSLSHGFDLRNLFETRKRSPSTFISKLSASAVVAKLEAVAKKLNLRITGKKEFMVRMQGVTEGRKGKVGMTVEVFEVAPEVAVVEFSKNAGDTLEYIKLCEDQVRPSLNDIVWSWQGQGSS

SEQ ID NO: 12220 - protein, 127 aa, Bordetella parapertussis 12822
MALSKAEILDAIAGMSVLELSELIKEMEEKFGVSAAAAAVAVAAPAAGGAGAAAAEEQTEFTVVLLEAGANKVSVIKAVRELTGLGLKEAKDLVDGAPKPVKEALPKADAEAAKKKLEEAGAKVEVK

SEQ ID NO: 12221 - protein, 346 aa, Rhodococcus erythropolis
MTTVEVPHSSRSAVLTVSGVIEETSDARSLVFEIPAELKDKFDYKPGQFLTLRIPSDQTGSVARCYSLASSPFTDDAPKVTVKRTVDGYGSNWLCDKLQVGDTIEVLPPSGVFTPKSLDHDFLLFGAGSGITPVISILKSALTQGSGNVVLIYANRDEKSVIFGAELRELAAQHPGRLTVVHWIETVQGLPAVSQLATLAKPFVAYEAFMCGPGPFMDAVHKALAEAGMPRTQVHAEVFNSLAGDPFRDVEVAEVSDEEAADAATVEVELDGETHTLVWPRKQTLVDIMLAKGLDVPYSCKEGESGSCACTVTEGEVQMDNSEILDAEDVANGYILGCKRSRSPIA

SEQ ID NO: 12222 - protein, 499 aa, Rhodospirillum rubrum
MTQAAPPIDWTARARALRLPNHALIDGAPASAGDGATFDCVSPIDGRVLTRVAACGAADVDRAVAAGRAAFEDRRWCGLSPAARKKILLAFAERIEAHRDELALLETLDMGKPIADSLAVDVPATARCLRWYAEALDKVYGEVAPTGDDVLATITREPLGVVGVVVPWNFPMIMAAWKIAPALAAGNSVVLKPAEQSPLTAIRLGELALEAGLPAGVLNVVPGLGPVTGRAIGLHPDIDGAFFTGSTAVGKLFLSYSSQSNMKRLGLECGGKSAHIVLASCKNTTAAAQAAASAIFFNQGEMCTAGSRLIVERAIADEVIEKVVAEAAFWRPGPPLDPATRMGALVDAEQTERVLGYIALGQDEGARLATGGSRAMAESGGCYVEPTIFTGVAPTMRIAREEIFGPVLSVITVESADEAVRVANDSDYGLAAAVWSDDVTTLHRVAKRLRAGMVYANCYDADDITVPFGGFKQSGIGRDKSLHAIDKYTELKTTWLRLG

SEQ ID NO: 12223 - protein, 440 aa, Candida albicans SC5314
MPSIDNDAGASTVSSSISLVKTIIGAGLLSMPLAYSTDGIIFGTFIILLAAFTSGFGLFLQCYVSRYVPVKHATFFNLCSITYPHLSVVFDFAIAVQCFGCAVSYLVLIRDLMPTIVTYVPYIDEKHYPSFWLLVSTVLTIPLSFLKNLDSLKYSSILGLVAIFYMTILVIGHYFAGDIERQGQITLFPTSVTGVFSTFSIIVFAFTGHQNMFSIINEARDKSLTSLTKLVNFAIGISSLLFIAVGLSGYLTFGQDVDGNVILSYPNGLTTTIGRFCIVFMVTFSFPLMIHPARISINNIYHWVTTNYFDKDEANESTALLGNESQESQIAEDEEQGKTHLSHVVPFPHKHFVIVTTSLLIIGYLLAISIKSFALILAIVGASGSTSISFILPGLFGYKLIGSESDDPSTLEVAFKNLSLGLTFWGVAVMILCLYSSLTL

SEQ ID NO: 12224 - protein, 486 aa, Vibrio parahaemolyticus RIMD 2210633
MEMKTHYIDGAMYIGCSEEHFTTYNPANGEPLANIKQANQSDMEAAIESAKRGFEVWSAMTAIERSRILNKAVAILRERNDELAALEVADTGKPIQEAIAVDITTGADVIEYYAGLAPSLQGEQQPLNENQFFYTRREPLGICAGIGAWNYPIQIAMWKSAPALAAGNAMIFKPSEETPLTALKLAEIYSEAGLPDGVFNVVQGDYRVGQMLTAHPDIAKVSFTGESGTGKVVMGDSAKTLKQVTMELGGKSPLIVFDDAKLDDAVSAAMVANFYTQGEVCTNGTRVFVHESIYDDFVAQLKTRTEKLVVGDPLDENTQIGALISKEHESKVLSAIESAKASGATLLTGGYKVTDNGLQNGNFVAPTVFIDCDDSMSHVQQEIFGPVMSVLKFSEEAEVIERANDTDYGLAAGVFTQNLSRAHRVIHKIQAGICWVNAWGDSPAEMPVGGYKQSGIGRENGVETLKHYTQTKSVLVQLSDFESPYA

SEQ ID NO: 12225 - protein, 500 aa, Magnaporthe grisea 70-15
MISRPVLYAITMAMSAMTASAGPCSSDPCAALSAAGLQDPILRPNSTAYQDRINTLWSASARLAPACIVTPKDANEVALVLKALQKTPKAKFAIRGRGHSHWAGGDNVDGGVQIDLSLHFVGVTYNPDTKLASVLPASRWGTVFEELERQHGVAVVGGRDGNLGIGGFLTGGGNSFHTAKYGFGCDNVVNAEVVLADGRIVNVNKDENADLFKALKGGWGNFGIVTRFDLFTFPSSPVWGGLRVATLSQGAAVADSMVNFTANYHKNRGSAYLINWTYSPSMGKDPVISLFLVDTEGVEKGPAFAEALKIPEIMDALSVNRLDNLVDTYALPAGKRHVWYTLTFANDARVVNKAAELNTVFVADLLKVVPAEQLGTQLLVQPMPKIFFEHGVEKGGNVMGMDRVDGDSLQLLIACTVETAEQEKFLHERSAKLKDDVAAFAKSIGALRDWEYLNYADPTQDPFDSYGAANVAFLKQVSAKYDPTGFFQKQQGGGFRLPKA

SEQ ID NO: 12226 - protein, 141 aa, Neurospora crassa
MQNSMSQAYAAPPSIPNTSTEKPHYDAPTAATAGTTYPQADPTTGATAAAGTTPATNRPTTASTYGNEKSVATTPAVTKTRFGASDIILFILAIFIPPLAVFLDRGFKVDFWINILLTILAWFPGVIHAWYVLFRHPTGRD

SEQ ID NO: 12227 - protein, 397 aa, Synechococcus elongatus PCC 7942
MAANLLEQLRGMTVVVADTGDIQSIATFTPRDATTNPSLITAAAQMPQYQSIIDDTLRQVRTELGAEAPVEAIVAEAIDELFVAFGLRILEIVPGRVSTEVDARLSYDTEATIAKARKLIGLYERAGIRRDRVLIKIASTWEGIRAAEVLEKEGIHCNLTLLFGFHQAVACAEAGVTLISPFVGRILDWYKKESGRDAFPGAEDPGVQSVTQIYNYYKKFGYATEVMGASFRNISEIIELAGCDLLTISPGLLEELRQTEALLERKLDPAIAESLELEQIHLDRDRFAELHQADRMANEKLDEGIRGFCKAIDTLEGLLKQRLAVLEGKAVFHHAAHEVFSVCDLDGDGFITREEWLGSDAVFDALDLNKDGKLNEEDLLAGLGATLQMAGRAVATV

SEQ ID NO: 12228 - protein, 372 aa, Bacillus subtilis subsp. subtilis str. 168
MEEKQHYSPGLDGVIAAETHISYLDTQSSQILIRGYDLIELSETKSYLELVHLLLEGRLPEESEMETLERKINSASSLPADHLRLLELLPEDTHPMDGLRTGLSALAGYDRQIDDRSPSANKERAYQLLGKMPALTAASYRIINKKEPILPLQTLSYSANFLYMMTGKLPSSLEEQIFDRSLVLYSEHEMPNSTFAARVIASTHSDLYGALTGAVASLKGNLHGGANEAVMYLLLEAKTTSDFEQLLQTKLKRKEKIMGFGHRVYMKKMDPRALMMKEALQQLCDKAGDHRLYEMCEAGERLMEKEKGLYPNLDYYAAPVYWMLGIPIPLYTPIFFSARTSGLCAHVIEQHANNRLFRPRVSYMGPRYQTKS

SEQ ID NO: 12229 - protein, 317 aa, Desulfitobacterium hafniense DCB-2
MAPALAAGCTVVARGSEVAPLSLIELFKCLQDAGIPKGVANSIQGPAAVTTAAMMKHPAVRVVSFTGSTPVGRSLMRQAADGVIRLALELGGNAPFIVFADADIEKAVEGAMIAKFRNNGQSCIGANRFYVHERIYDKFTALFAEKILRMKIGNPTEEVDLDLGPMVNLKDKARIESLIREAEALGAKPLVPKAEVPAEGYYVPPVILENVPESAALAREELFAPVAPLFKFADENEVIEKANSSDMGLAAYVYTNDLSRSIRVTESLKFGIIGLNNALPSVAYAPMGGVKQSGIGREGARIGLEEFMDVKYVATEI

SEQ ID NO: 12230 - protein, 477 aa, Acinetobacter sp. NCIMB9871
MNYPNIPLYINGEFLDHTNRDVKEVFNPVNHECIGLMACASQADLDYALESSQQAFLRWKKTSPITRSEILRTFAKLAREKAAEIGRNITLDQGKPLKEAIAEVTVCAEHAEWHAEECRRIYGRVIPPRNPNVQQLVVREPLGVCLAFSPWNFPFNQAIRKISAAIAAGCTIIVKGSGDTPSAVYAIAQLFHEAGLPNGVLNVIWGDSNFISDYMIKSPIIQKISFTGSTPVGKKLASQASLYMKPCTMELGGHAPVIVCDDADIDAAVEHLVGYKFRNAGQVCVSPTRFYVQEGIYKEFSEKVVLRAKQIKVGCGLDASSDMGPLAQARRMHAMQQIVEDAVHKGSKLLLGGNKISDKGNFFEPTVLGDLCNDTQFMNDEPFGPIIGLIPFDTIDHVLEEANRLPFGLASYAFTTSSKNAHQISYGLEAGMVSINHMGLALAETPFGGIKDSGFGSEGGIETFDGYLRTKFITQLN

SEQ ID NO: 12231 - protein, 224 aa, Oceanobacillus iheyensis HTE831
MNEQDKLKKAVGEKAATMVKDGMKVGLGSGSTVYWMIRSLGERIQQDGLKIEGIPSSNQTATWAEEAGIPLTDFSNVKELDITIDGADEVDANNHLIKGGGAALFREKIIAQAAKEFVIIVDQSKVVETLGEFSLPVEVLPFSWQRTANEISKLGCVPTVRVHEEEPLVTDNGNYILDCPFKVIPHPDKLNKEIKSIVGVIETGLFIDMATTVIVGEKDNIYIK

SEQ ID NO: 12232 - protein, 287 aa, Staphylococcus epidermidis ATCC 12228
MAIQWYPGHMAKAKRQVSEQLKKVDVVFELVDARIPYSSRNPMIDDVIKQKPRVVILNKKDMTNLKELEKWEIYFKNEGFYPVAVDAKHGKNLKNVEVEAIKATQEKFDREKAKGLKPRAIRAMIVGIPNVGKSTLINKLAKRSIAETGNKPGVTKQQQWIKVGKSLQLLDTPGILWPKFEDEEVGKKLSLTGAIKDSIVHLDEVAIYGLNFMIKHDVSALKRHYNIDTHEDAEILDWFDAIGRRRGLLQKGNEVDYESVIELIINDMRNAKIGTYCFDILKEMKSE

SEQ ID NO: 12233 - protein, 113 aa, Glycine max
RICALQTHRPKVGRIEAMASRLLAAASSSSSSSSPLARLISSRRMAGAADHHGSTKVNMWQEPLNPGNWKEEHFVLTSLAMWGAIIYGGLKVFGGKKEVKTEAGSAPAAAPAH

SEQ ID NO: 12234 - protein, 255 aa, Brassica napus
GDIHGQYQDLLRLFEYGGYPPSANFLFLGDYVDRGKQSLETICLLLAYKIRYPSKIYLLRGNHEDAKINRIYGFYDECKRRFNVRLWKIFTDCFNCLPVAALIDDKILCMHGGLSPELDNLNSIREIQRPTEIPDSGLLCDLLWSDPDQKIEGWADSDRGISCTFGADKVAEFLDKNDLDLICRGHQVVEDGYEFFAKRRLVTIFSAPNYGGEFDNAGALLSVDESLVCSFEIMKPALASSSGHPLKKVPKMGKS

SEQ ID NO: 12235 - protein, 488 aa, Coptis japonica
MEVLSIAIVSFSFLLFLFFILRDSRPKNLPPGPRPSPIVGNLLQLGDKPHAEFAKLAQKYGELFSLKLGSQTVVVASSPAAAAEILKTHDKILSGRYVFQSFRVKEHVENSIVWSECNDNWKLLRKVCRTELFTPKMIESQSEIREAKAREMVKFLRGKEGEVVKIVEVVFGTLVNIFGNLIFSKDVFDLEDPTGGSVELKEHLWKLLDMGNSTNPADYFPIMGKLDLFGQRRAVAEVLQQIYDVWGVMLKERRGTKGSESKNDFVDVLLNAGLDDQKINALLMELFGAGTETSASTIEWAITELTKKPLVVSKIRLELVNVVGDNTVKESDLPHLPYLQAFVKETLRLHPPTPLLLPRRALETCTVMNYTIPKECQIMVNAWAIGRDPKTWDDPLNFKPERFLSSDVDYKGNDFELIPFGGGRRICPGLPLASQFSNLIVATLVQNFEWSLPQGMSTSELSMDEKFGLTLQKDPPLLIVLKARASNI

SEQ ID NO: 12236 - protein, 338 aa, Morganella morganii
MIMKALVLEKAGKIAIQDWQSNEVLGDDDVEIKIHTVGICGSDVHYYQHGRIGPFVVDEPMVLGHEASGVITAAGKNVKHLKVGDRVCMEPGIPDLQSPQSRAGIYNLDPAVRFWATPPIDGCLRESVIHPAAFTFKLPDNVSFAQGAMVEPLAIGMQSATKAGIKPGDIGLVIGAGTIGIITQSALAGGCSDVIICDVFDEKLKVAEKYQGLHAVNSKDQQALADKVRELTGGEGVNVLFECSGAKPVIASISDHIAPGGTAVLVGMPIDPAPLDIVAAQAKEVTFKTILRYANMYPRTIRLLSSGKLNVAPLLSATYKFKDSVEAYERAAEPVRLM

SEQ ID NO: 12237 - protein, 163 aa, Desulfitobacterium hafniense DCB-2
MALSEYMAALAEAKALGLTRQIGVSNFNIELTRQAIEAVGKGEIATNQIELSPYLQSRKLTAFLKEQGIAVTSYMTLAYGKVLKDPVLGQIAAKHHATVAQVALAWALQLGYAVIPSSTKRENLASNLLARDLKLDADDMALIASLERNGREVSPEGLAPVWD

SEQ ID NO: 12238 - protein, 119 aa, Vitis vinifera
MGSSGAVKLACVMVICMVVAAPAAVEATITCGQVASAVGPCASYLQKGGSVPAGCCSGIKSLNSAAKTTVDRQAACKCLKTFSGSIPGINFGLASGLPGKCGVSVPYKISPSTDCSKVT

SEQ ID NO: 12239 - protein, 161 aa, Pseudomonas aeruginosa UCBPP-PA14
MSDSLLSIPCTTIKGEQKTLADFGGKALLVVNTASKCGFTPQYQGLEALWEKYRERGLVVLGFPCNQFGKQEPGDEGEISQFCELNYGVSFPLFRKIEVNGAGAHPLFVSLKKRALGLLGSQGIKWNFTKFLIGRDGQVVKRYAPTTKPEELSSAIEALLE

SEQ ID NO: 12240 - protein, 119 aa, Vitis vinifera
MGSSGAVKLACVMVICMVVAAPAVVEATVTCGQVASALSPCISYLQKGGAVPAGCCSGIKSLNSAAKTTGDRQAACKCLKTFSSSVSGINYGLASGLPGKCGVSVPYKISPSTDCSKVT

SEQ ID NO: 12241 - protein, 490 aa, Glycine max
MESRTKSNPQLTRALCYANDGNQQGRSPSVIVIGGGMAGIAAARSLHDASLQVVLLESRERIGGRIHTDYSFGFPVDMGASWLHGVSNENPLASVIGRLGLPLYRTSGDNSILYDHDLESYGLFDMDGKQVPQELVAKVGEIFEAILQETDKIRQESSEDMSVLRGLSIVFDRKPELRLEGIAYKVLQWYLCRLEGWFAADTDAISLKGWDQEVLLPGGHGLMVRGYLPVVNSLAKGLDIRLGHRVTKVVRRYNGVKVTVENGKTFFADAAVIAVPLGVLKAKKILFEPKLPDWKEAAIADLGIGLENKIILHFENVFWPNVEFLGVVADTPYECSYFLNLHKATGRAVLVYMPSGQLAKDVEKMPDEAAVNFAFMQLKKIFPDASSPIQYLVSRWGSDINSLGSYSYDAVGKPHELYERLRVPVDNLFFAGEATSMSYPGSVHGAYSTGTMAAEDCRMRVLERYGEVDLFQPVMGEEGSMSIPLQISRL

SEQ ID NO: 12242 - protein, 122 aa, Brassica napus
MACLISPVMKLRRLSSADSRRFAYRNLSDDDMEDSVIRVVVGKEKKEFMVEPYVLEETPFRVLIGSAKDRTQSRFNRTGRVVWLDHVDSILFEHLLWLLRNDASSFSDMDVAEIIEFYAQDC

SEQ ID NO: 12243 - protein, 490 aa, Arabidopsis thaliana
MAIIVVTTIFILLSFALYLTIRIFTGKSRNDKSHKLYDYETEIARTKPTFRFLSPGQSEIFTADPRNVEHILKTRFHNYSKGPVGTVNLADLLGHGIFAVDGEKWKQQRKLVSFEFSTRVLRNFSYSVFRTSASKLVGFIAEFALSGKSFDFQDMLMKCTLDSIFKVGFGVELGCLDGFSKEGEEFMKAFDEGNGATSSRVTDPFWKLKCFLNIGSESRLKKSIAIIDKFVYSLITTKRKELSKEQNTSVREDILSKFLLESEKDPENMNDKYLRDIILNVMVAGKDTTAASLSWFLYMLCKNPLVQEKIVQEIRDVTSSHEKTTDVNGFIESVTEEALAQMQYLHAALSETMRLYPPVPEHMRCAENDDVLPDGHRVSKGDNIYYISYAMGRMTYIWGQDAEEFKPERWLKDGVFQPESQFKFISFHAGPRICIGKDFAYRQMKIVSMALLHFFRFKMADENSKVSYKKMLTLHVDGGLHLCAIPRTST

SEQ ID NO: 12244 - protein, 249 aa, Triticum aestivum
  misc_feature (29)..(29): Xaa can be any naturally occurring amino acid
NQPFYCQTQQPFPQTQQSFPLQPQQPFPXQAQQPFPQPQLPFPQQPEQIIPQQPEQIITQQPFPLQPQQAFPQQPQQPFPQPQQPIPVQPQQPFPQQSQQSQQPFPRPQQLFPELQQPIPQQAQQPFPQQSQQPFPQQPQQPFPLQPQQSFPQQPQQPFPQQPQQPFPLQPQQPFPLRPQQPFSQQPSILQPQQPQQPFLQPQQQLSQQLGQTISQQPQQPFPQQPHQPQQPYPQQQPSGSSLTSIGGQ

SEQ ID NO: 12245 - protein, 224 aa, Zea mays
MASSMLSSAAVVTSPAQATMVAPFTGLKSSAAFPVTRKANNDITSIASNGGRVSCMKVWPPVGKKKFETLSYLPDLTEVELGKEVDYFLRNKWIPCVEFELYHGFGYREHGSTPEYYDGSYWTMWKSPPCWKDWTLLRGLKGSPKMGKTENPNRFSYGKNSGFEKTTPQGSGGSFFFPPKKTTPNFPRGGFIFFCKKPPSKKKTPRRVFFLLSTGAGGVFFSHR

SEQ ID NO: 12246 - protein, 201 aa, Glycine max
  misc_feature (46)..(46): Xaa can be any naturally occurring amino acid
  misc_feature (164)..(164): Xaa can be any naturally occurring amino acid
MSGRVSGKVKWFNDQKGFGFISPDDGSDDLFVHQSQIKSDGFRSLXEGESVEFAIESESDGRAKAVDVTGPDGASVQGTRRGGDGGRSYGGGRGGGGGGYGGGGGYGGGGGYGGGGGYGGGGRGGGGGACYNCGESGHLARDCSGGGGGDRYGGGGGGGRYGGXGGGGRYVGGGGGGGGGGSCYSCGESGHFARDCPSSAR

SEQ ID NO: 12247 - protein, 507 aa, Populus tremula x Populus tremuloides
MACSASDLAPLLSSTVNSTEAATYLCSQFTSISNHLSDTSYAVNNTYLLFSAYLVFAMQLGFAMLCAGSVRAKNTMNIMLTNVLDAAAGGLSYYLFGYAFAFGSPSNGFIGRHFFGLGDFPSPQADYSFFLYQWAFAIAAAGITSGSIAERTQFVAYLIYSTFLTGFVYPVVSHWLWSGDGWANPAKSDNNLLFGSGAIDFAGSGVVHMVGGIAGLWGALIEGPRIGRFDHNGRSVALRGHSASLVVLGSFLLWFGWYGFNPGSFLIILKSYGGGAGGYYGQWSAVGRTAVTTTLAGSTAALTTLFGKRLLSGHWNVIDVCNGLLRGFAAITAGCSVVEPWAAIICGFVAAWVLIGCNKLAEKLQYDDPLEAAQLHGGCGMWGLLFTGLFAKKAYVNEVYSNKPGRPYGLFMGGGGKLLAAQIIEILVIVGWVSATMGPLFYGLHKLKLLRISSEDEMAGMDLTRHGGFAYAYDAEDDVSGKPSFMMRKVLPANNTTPNENSPSINV

SEQ ID NO: 12248 - protein, 486 aa, Pseudomonas putida
MKEIKHFINGAFVGSASGRTFEDINPVNGQVIGRVHEAGRAEVDAAVKAARAALKGPWGKMTVAERADILHRVADGITARFDEFLEAECLDTGKPKSLASHIDIPRGAANFKVFADLLKNVANEAFEMATPDGAGALNYGVRRPKGVIGVISPWNLPLLLMTWKVGPALACGNCVVVKPSEETPLTATLLGEVMQAAGVPAGVYNVVHGFGGDSAGAFLTEHSDVDAYTFTGETGTGETIMRAAAKGVRQVSLELGGKNAGIVFADCDMDKAIEGTLRSAFANCGQVCLGTERLYIERPIFDAFVARLKAGAESLVIGPPDDASSNFGPLVSLKHREKVLSYYQQAVDDGATVVTGGGVPEMPAHLAGGAWVQPTIWTGLSDNSAVVTEEIFGPCCHIRPFDTEEEAIELANSLPYGLASAIWTESSSRAHRVAGQIEAGIVWVNSWFLRDLRTAFGGSKQSGIGREGGVHSLEFYTELKNICVKL

SEQ ID NO: 12249 - protein, 336 aa, uncultured marine gamma proteobacterium EBAC20E09
MIRNLLINLFFLIPVWLIRLVALPFRDVKRNTIFDPQAKFFLALIPKFEIHLIGDQDISKIRNQIHEKRNNLRLSRKIKKNIKTIDHLINQNNSLSLREYVPYKIDNSNVILFFHGGGYVLNSVDTHHDMVCYFSEKLRTRIYSLEYSLAPENKFPKARDESLLALRWLIEQGHNPANISLCGDSAGAHLAVSLSQHLKNNENIKLHSQCLIYPMCDPKCDSESHKIFKHGYLLTHEAMKWFWQKFSSSKLDIEDSTFNLMIEDTTIQQPKTILVTAGFDPLVDEAEEFAFLLHENDNTVIQLHYPSLFHGFASMTRLKSAKLAVDDFLREYKEIL

SEQ ID NO: 12250 - protein, 110 aa, Glycine max
  misc_feature (34)..(34): Xaa can be any naturally occurring amino acid
  misc_feature (82)..(82): Xaa can be any naturally occurring amino acid
KIYCPNVSTVNHAGAGMVAPFTGLKSMADFPTRXTNNDITSIASNGGRVQCMHVWPPDGKNKVDTLPYLPDLDDAQLANEGXYLHTKGWIPSLEYELEHGNVYPEHNMSP

SEQ ID NO: 12251 - protein, 105 aa, Candida albicans SC5314
MNQQNARDIELREQDRWLPIANVARIMKNTLPPTAKVSKDAKECMQECVSEFISFITSEASDKCLKEKRKTINGEDILYSMYDLGFENYAEVLKIYLAKYREARK

SEQ ID NO: 12252 - protein, 224 aa, Oryza sativa (japonica cultivar-group); identical to SEQ ID NO: 275

SEQ ID NO: 12253 - protein, 132 aa, Zea mays
  misc_feature (29)..(29): Xaa can be any naturally occurring amino acid
  misc_feature (57)..(57): Xaa can be any naturally occurring amino acid
MLLSHFQQIRTFIQMRTNLKVVDNSGAKXVMCIQSLRGKKGARLGDMIIGSVKEAQXPRGKVKKGDVVYGVVVRAAMKKGRSDGSEVQFDDNEVVLVNKKGELIGTRVFGPVPHELRKKKHLKILALAEHIV

SEQ ID NO: 12254 - protein, 275 aa, Bordetella pertussis Tohama I
MAQVPVLKLNDGNAMPQLGLGVWQVPNDQAAASVKAALAAGYRSIDTAAIYGNEAGVGEGLRAAGVARKDLFVTTKLWNDRHGYDEAQRAMDESLRKLGLAYVDLFLIHWPVAGSDKFVDAWRAMVAMKEDGRARSIGVSNFTIANLRRLVDETGVVPAVNQVELHPGFAQRELRAFHAEQGIATESWSPLGQGAVMHDATLAGIAARHGKSAAQVTLRWHLQNGLIVIPKSVTPARIQANIDVFDFELSADEMADIDALPEGPRLGPDPATFTG

SEQ ID NO: 12255 - protein, 223 aa, Oryza sativa (japonica cultivar-group)
MAPAAAMAILLLALLMPATLCSRSGPPSSKHGHGGHAKRAPPPASPVVPVAPQAAALVRATCNSTAYYDVCVSALAADPSSTTADVRGLSAIAVSVAAANASGAAQAAAALANGTAPLAAAAAGDGTVQALLRACAGKYGDARDALAAAKESMGQQDYDLATVHVSAGAEYPQVCKALFRRQRPGAYPAELAAREEALNKLCSVALDIIALLTSSPASNNNNS

SEQ ID NO: 12256 - protein, 412 aa, Zea mays
VICLLLAPHSSLPSLPVPLLLLPSPASGVDVTAVLSAFPNFADFARLLASTPVASELSGRSSLTLLAVPNANLPQSPSAFVASAGADIADVLRYHVLLEYLSPFDLARLSPSGKLVTTLFQTTGRAPSDFGAVNLTVGGNSTVVVRSPAPSPGSNATVLGAVTAVPYNLSVLAVGGLIIPSGFDLAASESRPPPPVNITRVLTDARGFNVAASMLQASGVASEFEADEHGAGITVFVPTDDAFAGLPATDRLQSLPAERKAVVLRFHVLHSYYPLGSLESIVNPVQPTLATEHTEAGHFTLNITRVNGSIAIDTGIVQASITRTVFDQNPVAVFAVSKVLLPKEMFGRGDSGNTAMAPPSVAMAPRDAGSEKTPQTRLSSPPDLHSEDSESSASLLTAKGTWWCIGLMYLQL

SEQ ID NO: 12257 - protein, 182 aa, Triticum aestivum
  misc_feature (145)..(145): Xaa can be any naturally occurring amino acid
APPERPAVDGVLSDLTCDSDGKVDQFIGGRSSLPLHELPAHGTRGYYLGMFLGGAYQEALGGLHNLFGGPSVVRVSQSDGPHCFAVTRAAPGPSCADVLRAMQHEPEVMFEVLKQRTTDDGATAAALARAFGSMPYLSFDAEEAXAMSGAESSGMSSDSEGSAAGAAEDDDEEWEFMRGLTV

SEQ ID NO: 12258 - protein, 342 aa, Methanosarcina mazei Go1
MTKTAAVIKGDGVGPELVDAMLKVAEASGTDVEFVMCEAGAGWWEEHGGNSLIPEETWQILDSSDACFKGPTTTPGGIGSPRSVAVSIRRKYDLYANVRPIKTFPNSSAPLGDVEMVCVREGTEGLYIGEEIQLTDDVSIAIRKITRTASSKIARYAFEDAKKRGYDTVVPIHKSNILKLTCGSFLEEVEKVAHDFPDIEVWPYHIDNIAQQLIKNPQIFNKKVLLSTNLFMDVISEECSALVGSIGLIYSANIGDNFAMFEPAHGSAPKYAGLDKVNPVATVLAGAWMLDYLGEKDKSDAIFKATERVISEGKYVTYDLGGSAKLSQMADEIAKYTEEILK

SEQ ID NO: 12259 - protein, 443 aa, Vibrio parahaemolyticus RIMD 2210633
MSYVFHRHCHATLPIIDKGEGVYLFDKQGKQYLDACGGAAVSNLGHSHQAVKKAMLEQLERVPFAHTGFFTSDSSERLAELICQHMPEQFNHVYLVSGGSEAVESALKMARQYFVESGKPEKKQFIARQQSYHGNTLGALAVGGNEWRREPFKPILHPSHHIAPCYAYRYQQSHESELDYSLRAANELEAKILELGADNVMAFVAEPIVGATAGAVPATQGYFKRIREICDQYDVLLILDEVMCGVGRSGSFFAFEQEEAEPDLVCMAKGLGAGYQPIGAVVANDRVYQAIADGSGFFQHGHTFMAHPVACAAAVATIQTIFQDDLLTAVNRQSALLRNELASALAHLPYIGDIRGKGLFFGIELVADKESKSPLSKATLADKRIKQRAMENGLMCYPMGGTIDGVNGHHILLAPPFIIQSHHIDELVGKLSLTLKEVAEIWK

SEQ ID NO: 12260 - protein, 283 aa, Methylococcus capsulatus str. Bath
MQKEGFLESAYGVRMPGIVYGTAWKKDRTAALVEQAVSLGFRGIDTACQPKHYDEPGVGAGLAACTNAGLERADLYLQSKFTPVDGQDPERMPYDPKASLAEQVARSFESSLKNLRTSYLDCLILHSPLSKEKDTLDVWRAMETVFDGGGARQLGISNCYRPELLERLYRWSRVKPAVVQNRFYAETRYDREIREFCRQNRIVYQSFWTLTANPSILAHATVRALAATHGRTPAQIFFRYLTQIGVVPLTGTASEAHMREDLAIFEFELTPDQCAAVSGLLRT

SEQ ID NO: 12261 - protein, 365 aa, Gibberella zeae PH-1
MAHTDVTEVDHTPTEHCEERNETGKPSKDLSASMAHIQIRQSSAEKHGWDEPVPESAPAVSFGHNLERNQESKMAGFPAGVVNIVNGCGAEAGSAITAHPGIDKIAFTGSTITGKTIMKKASETLKSVTLETGGKSPLIVFDDADFEQAVKWSNCGIMGLGNMGQICTATSRIFVQDTIYEKFLEAFHEQVKSSTVIGDPFDENTTHGPQVSKAQYEKILSLIESGKSEGAGLLTGGARSGDKGFYIQPTVFRDVKPNMKIVREEIFGPCFVIAPFSTEADAIERANDTEYGLGAAIFTENLRKAHRVAAGVQAGTVWIDSSQDTHWGVPFGGYKKSGIGRELGSYALSAYTQVKAVHATSQLYG

SEQ ID NO: 12262 - protein, 174 aa, Triticum aestivum
MAPAVMASSATTVAPFQGLKSTAGLPVSRRSSGSLGRVSNGGRIRCMQVWPIEGIKKFETLSYLPPLSTEALLKQVDYLIRSKWVPCLEFSKVGFVFREHNSSPGYYDGRYWTMWKLPMFGCTDATQVLNEVEEVKKEYPDAYVRVIGFDNLRQVQCVSFIAFRPPGCEESGKA

SEQ ID NO: 12263 - protein, 212 aa, Oryza sativa (japonica cultivar-group)
MDEEEHEVYGQEIPEDGDMDGADVDMASGGDDAAKLQELDQMKRRLKEMEEEAAALRDMQAKVAKEMQGGDPSASTAEAKEQVDARSVYVGNVDYACTPEEVQQHFQACGTVNRVTILTDKFGQPKGFAYVEFLEQEAVQEALNLNESELHGRQIKVAPKRTNVPGMKQRPPRGYNPYHGYPYRSYGAPYFPPYGYGRVPRFRRPMRYRPYF

SEQ ID NO: 12264 - protein, 216 aa, Oryza sativa (japonica cultivar-group)
MDEEEHEVYGQEIPEDGDMDGADVDMASGGDDAAKLQELDQMKRRLKEMEEEAAALRDMQAKVAKEMQGGPPGGDPSASTAEAKEQVDARSVYVGNVDYACTPEEVQQHFQACGTVNRVTILTDKFGQPKGFAYVEFLEQEAVQEALNLNESELHGRQIKVAPKRTNVPGMKQRPPRGYNPYHGYPYRSYGAPYFPPYGYGRVPRFRRPMRYRPYF

SEQ ID NO: 12265 - protein, 324 aa, Clostridium thermocellum ATCC 27405
MYEIYALQKGYKRMNPYKRIALKALSHWGRNLKKNYRVYRRFTNVVSVCTGHGCRIADLEVAAGDRNIPVRLFHPDDPALGVLIFFHGGGWVTGNVDSYTHVCSNMANQTKNIVVSVDYRLAPEHPFPSGLEDCYDATREFFKNPGLLNCKADDITLIGDSAGGNLAAAVSLMARDRGEFLPKRQILIYPSTYNDHSENSPFPSIRENGTGYLLTSEEIQNYMDMYAPNIEDRQSPYLAPLLARDLSNQPDTLIITAEYDPLRDEGEAYGMRLKEYGNNVKMYRIKGALHGFFSIPWKSQHVSRSFEIINWFLNSYNGQSEELL

SEQ ID NO: 12266 - protein, 123 aa, Triticum aestivum
  misc_feature (68)..(68): Xaa can be any naturally occurring amino acid
SKDDSGPCYTYPQRGGAIHTGGHIAIKAHTCQVVEACTYKTAKHGHAMCDFVAIDIFNRKKLDDIVPXCHNCDLPHVVRLDNHLIDITEDGYASLLTESGHTNDDLQLPTDDAVLGQIREWMC

SEQ ID NO: 12267 - protein, 403 aa, Sinorhizobium meliloti
MLTQKTKDIVKATAPVLAQHGYAIIQHFYKRMFQAHPELKDIFNMAHQERGEQQQALARAVYAYAANIENPESLSAVLKDIAHKHASIGVRPEQYPIVGEHLLASIKEVLGDAATDEIISAWAQAYGNLADILAGMESELYGRSEERAGGWAGWRRFIVREKNPESDVITSFVLEPADGGPVADFEPGQYTSVAVQVPKLGYQQIRQYSLSDSPNGRSYRISVKREDGGLGTPGYVSSLLHDEINVGDEPKLAAPYGNFYIDVSATTPIVLISGGVGLTPMVSMLKKALQTPPRKVVFVHGARNSAVHAMRDRLKEASRTYPDFKLFIFYDEPLPTDIEGRDYDFAGLVDVENVKDSILLDDADYYICGPVPFMRMQHDKLLGLGITEARIHYEVFGPDLFAE

SEQ ID NO: 12268 - protein, 431 aa, Cupriavidus necator
MTRTEQIQALQKDWDTNSRWKGIKRNFTAEDVVRLRGSVQVEHTLARPGSEKLWTLLHTEPFVNSLGALSGNQAMQQVKAGLKAIYLSGWQVAGDANLAGEMYPDQSLYPANSVPQVVKPINNTFQPPDQIQWSEGKGDTDFFAPIVADAEAGFGGVLNAFGLMKSMIEAGAAGVHFEDQLASVKKCGHMGGKVLVPTREAVAKLTSGGLGADVLGVPTLVIARTDGEAADLLTSDVDDNDKPFCTGERTVEGFYRVRNGLEQSISRALAYAEVADLVWCEIGKPDLEFAKKFAEAVHAKFPGKMLAYNCSPSFNWKKNLDDATIAKFQRELGAMGYKFQFITLAGFHSLNYSMFNLAYGYARNQMSAFVELQEAEFKAAEKGFTAVKHQREVGTGYFDAVTQTIEGGQSSTTALKGSTEDEQFFEDKKVA

SEQ ID NO: 12269 - protein, 501 aa, Sinapis alba
MSTNKKTIVWFRRDLRIEDNPALAAAAHEGSVFPVFIWCPEEEGQFYPGRASRWWMKQSLAHLRQSLKALGSELTLIKTHSTVSAILDCVRATGATKVVFNHLYDPVSLVRDHTVKEKLVERGISVQSYNGDLCMSPGRYTVKRANLLLVLILTGKKCLDMSVESVVLPPPWRLMPLSAAETVWACSVEELGLENEAEKPSNALLTRAWSPGWSNADKILNEFIEKQLIDYAKNSKKVVGNSTSLLSPYLHFGEISVRRVFQCARMKQIIWARDKNGEGEESADLFLRGIGLRDYSRIICFNFPFTHEQSLLSHLRFFPWDADVDKFKAWRQGRTGYPLVDAGMRELWATGWMHNRIRVIVSSFAVKFLLLPWKWGMKYFWDTLLDADLECDIIGWQYISGSLPDGHELDRLDNPAIQGAKYDPEGEYIRQWLPELARLPTEWIHHPWDAPLTVLKASGVELGTNYAKPIVVIDTARELLTKAISRTREAQIMIGACGDEM

SEQ ID NO: 12270 - protein, 191 aa, Zea mays
  misc_feature (36)..(36): Xaa can be any naturally occurring amino acid
  misc_feature (50)..(50): Xaa can be any naturally occurring amino acid
  misc_feature (58)..(61): Xaa can be any naturally occurring amino acid
  misc_feature (68)..(68): Xaa can be any naturally occurring amino acid
  misc_feature (83)..(83): Xaa can be any naturally occurring amino acid
  misc_feature (85)..(85): Xaa can be any naturally occurring amino acid
  misc_feature (91)..(91): Xaa can be any naturally occurring amino acid
PREAIDRVYFSETPVEVVKEHDQELSKLGAALIAMXGHVAQAFTLLKSSXEAQSVVAXXXXDKNVWDXVLKNERVMEFYKSHXQXLVNTFXEETGSTDSVESPEKFEEASPEYALPTASPLSDFVDSAKKTMMEMVDNITNFFQDMFHNPAEAEAGPGSSSKKPSFAEMAAGGSFMALAMAVILVVLFKRA

SEQ ID NO: 12271 - protein, 115 aa, Musa acuminata
PGREDKTLPREEGRLPDATKGSDHLRDVFGHMGLSDQDIVALSGGHTVGRCHKERSGFEGAWTSNPLIFDNSYFKELLSSEKDDLIQLPSDKALLTDPVFRPLVEKYAADVNACS

SEQ ID NO: 12272 - protein, 376 aa, Mycobacterium tuberculosis H37Rv
MTKSLPGVADLRLGANHPRMWTRRVQGTVVNVGVKVLPWIPTPAKRILSAGRSVIIDGNTLDPTLQLMLSTSRIFGVDGLAVDDDIVASRAHMRAICEAMPGPQIHVDVTDLSIPGPAGEIPARHYRPSGGGATPLLVFYHGGGWTLGDLDTHDALCRLTCRDADIQVLSIDYRLAPEHPAPAAVEDAYAAFVWAHEHASDEFGALPGRVAVGGDSAGGNLSAVVCQLARDKARYEGGPTPVLQWLLYPRTDFTAQTRSMGLFGNGFLLTKRDIDWFHTQYLRDSDVDPADPRLSPLLAESLSGLAPALIAVAGFDPLRDEGESYAKALRAAGTAVDLRYLGSLTHGFLNLFQLGGGSAAGTNELISALRAHLSRV

SEQ ID NO: 12273 - protein, 384 aa, Methanococcus maripaludis S2
MLNNSVKHLKMDNMENKIPMRRMVHKIIYECNIVLLVVDARDPETTRNRALEEYTIEKNKKLIYVINKSDLVPKKILEKWKNKFKSENPDSSVVFVSAKEKLGTKMLRDEIKTYLNSNNIKYGQVGIVGYPNVGKSSIINALTGKKSARSGLTAGLTVGEQWVKLTKDIKLLDSPGIIEPKDEDELVISGALRYEKADDIISPALKILNRIHTFDNTILKEYYGFEIGEEINIELLEKIGTKLNFLTKDGKIDIDRTSKSIIREFQNGKLNYHRMNLKKYEQKRTKNIDFITKHLKDFPFINDADQIILHLENINELGKLNTRPVIGIKELDDAFVIISFSEKSRDTGRKKVEELARTSDIELYSLGDGRVGKHRIYVGVGEKR

SEQ ID NO: 12274 - protein, 282 aa, Mycobacterium tuberculosis H37Rv
MTGESGAAAAPSITLNDEHTMPVLGLGVAELSDDETERAVSAALEIGCRLIDTAYAYGNEAAVGRAIAASGVAREELFVTTKLATPDQGFTRSQEACRASLDRLGLDYVDLYLIHWPAPPVGKYVDAWGGMIQSRGEGHARSIGVSNFTAENIENLIDLTFVTPAVNQIELHPLLNQDELRKANAQHTVVTQSYCPLALGRLLDNPTVTSIASEYVKTPAQVLLRWNLQLGNAVVVRSARPERIASNFDVFDFELAAEHMDALGGLNDGTRVREDPLTYAGT

SEQ ID NO: 12275 - protein, 640 aa, Zea mays
  misc_feature (61)..(61): Xaa can be any naturally occurring amino acid
  misc_feature (124)..(124): Xaa can be any naturally occurring amino acid
  misc_feature (199)..(200): Xaa can be any naturally occurring amino acid
HTGDWKIDESPVDGKKFDRQALEELSKEGVTLMMSDSTNVLSPGRSISESVVAGSLLRHIXGTTRPKGRVITTQFASNIHRIGSIKAAADLTGRKMVFVGMSLRTYLEAAFKDGKAPLDPSTLXIKVEDMDAYAPKDLLVVTTGSQGEPRAALNLASYGGSHALKLSKEDVLLYSAKVIPGNETRVMKMMNRLTDLGPXXIMGKDSGLHTSGHAYREELEEVLRIVKPQHFLPVHGELLFLKEHESLGRSTGIRHTTVIKNGEMLGVSHLRNRRVLSNGFVSLGKEDLQLMYSDGDKAFGTSTDLCVDERLRIASDGIIFVSMEIFRPQKEHGLAQSGLKGKFKITTRCLWLDNGRLLDALYKAAHAALSSCPVNCPLSHMERMVAEILRKMVRKYSGKRPDVIAVATENTTAGFSEHLDAKASGNFGPSSATSHLSRSPATTLEGSYKTHPDNPEVDAEETLPEAARTAPDDATTSSNGEAFFSSDLHQPKTLEHFWESFKSPTAVKIARIVNGGKKQNLGKIGIMGKDSSIQSAPAPAKSSKKNKWKPEEIKSLIQMRGEMNERFQSVKGRMVLWEEISDNMLKQGISRTPAQCKSLWTSLVQKYEESKKDAESMKTWPYFSAMDRILSQQGEMATKG

SEQ ID NO: 12276 - protein, 478 aa, uncultured bacterium 580
MKPKTNIVWLKRDLRLTDHAPLYEATCRDEQFLVLYIYEPSLINDSHTDERHWRFIQQSLSVMEKILAKQSKQLSIAYGEADQIFSEIINQHEITNVFSHEETGLKLTYERDKKLKKIFNAKKIQWHEYQTNAVIRGLNNRKTWEKQWNKVMREEIKTINLAEANIISHNFPNYSIPKFRNDLNYQPGGCLPGQKEMHDFFETRGQDYFKFISKPDRSRTSCSRLSPYIAYGNLSMREVYQTLLKSWNKTGWRRSMAALSSRLHWHCHFIQKYESEIDIEDLPINRGYKDFPYKVINCEHEDFLAWANGETGYPLIDASMRALKKTGYLNFRMRAMVVSFACHYFMIHWKLVAKHLATLFLDFEPGIHYPQIQMQAGVTGINTIRIYNPSKQLQDHDPDTKFIRDWIDELSDQDKEYILGLPDDNFDLFSNSQNFYPTPAYDFFERTKYAKNLLWQWKKSSLVKSYNSKILSRHVKVR

SEQ ID NO: 12277 - protein, 139 aa, Triticum aestivum
  misc_feature (28)..(28): Xaa can be any naturally occurring amino acid
  misc_feature (38)..(38): Xaa can be any naturally occurring amino acid
  misc_feature (66)..(66): Xaa can be any naturally occurring amino acid
  misc_feature (83)..(83): Xaa can be any naturally occurring amino acid
  misc_feature (97)..(97): Xaa can be any naturally occurring amino acid
NCKTFTAVEPIPGLLEWRIIYVGSAKNXEYDQVLEEFXIGPVQEEATMKFTVECPPPDFTRIPRDXLICVTAIIITVSYRAQXFIRVGYYVHNVLNXTLPEEERPNAEPATLIAHTRRTILTDKPRITKFRINWGEHRE

SEQ ID NO: 12278 - protein, 188 aa, Medicago sativa
AWHSAGTFDSKTKTGGPFGTIKHQAELAHGANNGLDIAVRLLEPLKEQFPIISYADFYQLAGVVAVEITGGPEVPFHPGREDKPEPPPEGRLPDATKGSDHLRDVFGKAMGLSDQDIVALSGGHTIGAAHKERSGFEGPWTSNPLIFDNSYFKELLGGEKEGLLQLPSDKALLSDPVFRPLVEKYAAG

SEQ ID NO: 12279 - protein, 420 aa, Glomerella cingulata
MTTNGSDKPQVQPCRYKVGKTLGAGSYSVVKECVHIDTGRYYAAKVINKRLMAGREHMVRNEIAVLKKVSMGHQNILTLVDYFETMNNLYLVTDLALGGELFDRICRKGSYYESDAADLIRATLSAVAYLHDHGIVHRDLKPENLLFRTPEDNADLLIADFGLSRIMDEEQFHVLTTTCGTPGYMAPEIFKKIGHGKPVDVWALGVITYFLLCGYTPFDRDSDFEEMQAILNADYSFTPFDYWRGVSEHAKDFIRKCLTIDPKKRMTAHEALQHPFVAGYLNGEGEGQNLLPTVKKNFNARRTLHAAIDTVRAINKLREGQQNLMDGAKSREPDRGLKSPPNAKKDDSAISMGNTNHKDSGYGTQPEADNQNDVCHDRCGTTPTSVPASLRVRAVSRTRSLRQAKDCGAVPQCDDSLEAV

SEQ ID NO: 12280 - protein, 129 aa, Bifidobacterium longum bv. Infantis
MPTGRVRWFDAAKGYGFITSEEGKDVFLPAQALPTGVTTLRKGAKVEYSVVDGRRGPQAMDVRLIASAPSLVKATRPKADDMAAICEDLIKMLDAAGNTLRRHRYPSAADSKKLATLLRAVADQFDVQD

SEQ ID NO: 12281 - protein, 486 aa, Mycobacterium avium subsp. paratuberculosis str. k10
MADPPALVQTYQLYIDGQWVEPQDGRYDDLSPSTEAVIATAPDASVAQVDDAIAAARRAFDSGPWGRMSAEQRARCLNQLGEALTKHADDFFALSQTEWGCIGNERIMQIDGAGFMSLHAAQLATQLVDQEVAGISAGTTLLRHVPLGVVAVLTPWNFPHCLNVMKLNHALAAGNTVVLKPSPLTPLAGLALARLIDEHTDIPPGVVNVVTPSGVEAAKLLTTDPRIDMVSFTGSSAVGRQVMSAAGDTIKRILLELGGKSASIVLDDANVTDEMLEQMLFQSCSLHAGQACILHSRLLLPDSLHDDVVDRLAALAREVKVGDPTDPDVQMGPLISAAQRDRVEAHIAGARSDGATLVTGGGRPAGLDVGYYVEPTILSGVEPNSTIAQEEVFGPVLSVLRYRDDDDAVAIANNSRYGLSGAVWGDDVDRAVGVARRIRTGQIAVNGISPAGAPFGGFRLSGLGREGGGIGGLHQYMEPMAIGVPA

SEQ ID NO: 12282 - protein, 219 aa, Prunus armeniaca
MEKTECSEAENFGSVTTSLEPQATAKRKKAKSKNQRRFSDEQIRLLESIFEADSKLEPRRKVQVARELGLQPRQVAIWFQNRRARWKSKQIEQDFRTLRADYDNLASRFESLKEEKQSLLMQMQKLNELVGKPSQGLEGNIMVDGSRLQEELEPRGVIQSHKNNTSNDVGCHGDEIHELLSMAHVDASSLSPQDWHRFEPSILFDPSRFTSSHWLNFWT

SEQ ID NO: 12283 - protein, 214 aa, Oryza sativa (japonica cultivar-group)
MEYYEQEEYATVTSAPPKRPAGRTKFRETRHPVYRGVRRRGPAGRWVCEVREPNKKSRIWLGTFATAEAAARAHDVAALALRGRGACLNFADSARLLRVDPATLATPDDIRRAAIELAESCPHDAAAAAASSSAAAVEASAAAAPAMMMQYQDDMAATPSSYDYAYYGNMDFDQPSYYYDGMGGGGEYQSWQMDGDDDGGAGGYGGGDVTLWSY

SEQ ID NO: 12284 - protein, 644 aa, Zea mays
MISARTAAASPASLWKQGGRSEGGGSCDGCRTYRNTLRRAAAAKVRALPSRAVEAVKMGSAAEMEQEEAEVAAAAAGVVVEDHYGEDSATEELPILPWAFSVASGYTLLRDPHHNKGLAFMEKERDAHHLRGLLPPAVVPQELQIKKIMHNLRQYQVPLQRYMAMMDLQERNERLFYKLLIDNVEELLPVVYTPTVGEACQKYGSIFRQPQGLYVSLRDKGKVLEVLRNWPHRNIQVICVTDGERILGLGDLGSQGMGIPVGKLALYTALGGVRPSACLPITIDVGTNNEKLLNDEFYIGLRQKRATGEEYHELMEEFMAAVKQIYGEKVLIQFEDFANHNAFNLLAKYSKSHLVFNDDIQGTASVVLAGLLAALKVVGRTLAEHTYLFLGAGEAGTGIAELIALEISKQTSAPIEECRKKIWLVDSKGLIVDSRKNSVQSFKKPWAHEHEPLTTLYDAVQSIKPTVLIGTSGVGRTFTKEVVEAMASFNERPIIFSLSNPTSHSECTAEEAYNWTQGRVIFASGSPFGPVEYDGKVFVPGQSNNAYIFPGFGLGLVISGAIRVHEDMLLAASEALAAQATQENFDKGSIFPPFTNIRKISARIAAAVAAKAYELGLATRLPPPRDLVKYAQSCMYTPVYRNYR

SEQ ID NO: 12285 - protein, 262 aa, Thermotoga maritima MSB8
MSWYPGHIEKAKRQIKDLLRLVNTVVEVRDARAPFATSAYGVDFSRKETIILLNKVDIADEKTTKKWVEFFKKQGKRVITTHKGEPRKVLLKKLSFDRLARVLIVGVPNTGKSTIINKLKGKRASSVGAQPGITKGIQWFSLENGVKILDTPGILYKNIFSEDLAAKLLLVGSLPVERIEDQRIFERAFEIFARSIGIESSFSEFFEDFARKRGLLKKGGVPDIERALMLFFTEVAQGKAGRVSFERPEDITPVQQEQTRGV

SEQ ID NO: 12286 - protein, 404 aa, Escherichia coli
GKKITLQNGKLNVPENPIIPYIEGDGIGVDVTPAMLKVVDAAVEKAYKGERKISWMEIYTGEKSTQVYGQDVWLPAETLDLIREYRVAIKGPLTTPVGGGIRSLNVALRQELDLYICLRPVRYYQGTPSPVKHPELTDMVIFRENSEDIYAGIEWKADSADAEKVIKFLREEMGVKKIRFPEHCGIGIKPCSEEGTKRLVRAAIEYAIANDRDSVTLVHKGNIMKFTEGAFKDWGYELAREEFGGELIDGGPWLKVKNPNTGKEIVIKDVIADAFLQQILLRPAEYDVIACMNLNGDYISDALAAQVGGIGIAPGANIGDECALFEATHGTAPKYAGQDKVNPGSIILSAEMMLRHMGWTEAADLIVKGMEGAINAKTVTYDFERLMEGAKLLKCSEFGDAIIK

SEQ ID NO: 12287 - protein, 404 aa, Aspergillus nidulans FGSC A4
MASQVQPGQKPKVQPCRYKTGKTLGAGSYSVVKECVHIDTGQYYAAKVINKRLMVGREHMVRNEIAILKQVSTGHQNILTLVDYFETMNNLYLVTDLALGGELFDRICRKGSYYESDAADLVRAILSAVAYLHDHGIVHRDLKPENLLFRTPEDNADLLIADFGLSRIMDEEQLHVLTTTCGTPGYMAPEIFDKSGHGKPVDIWAIGVITYFMLCGYTPFDRETNLEEVQAIATANFSFTPVEYWRGVSQEARDFIKRCLTVNPKKRMTAHQALQHPWINPPYDTTDDLGSGEDLLPNIKKNFNARRTLHKAIDTVRAINKLRENGGLMMDGIMSVDPKPEHVNGSEVVEDRTTPRERENEDAMEIDSRSNARGQTEQQIREQERKVKETVAGLWSRTAPRSER

SEQ ID NO: 12288 - protein, 200 aa, Candida albicans SC5314
MATNITWHANLTHQERAELRKQKGVTVWLTGLSASGKSTIACALEQSILARGLNSYRLDGDNIRFGLNKDLGFSEADRNENIRRISEVAKLFSDSCCITVTSFISPYRADRRLARELHEKDNLPFVEVYIDVPLEVAEQRDPKGLYKKAREGIIKEFTGISAPYEAPEKAEIHVKNHSGLSVEQAAEQIIDYLLEKGYIN

SEQ ID NO: 12289 - protein, 231 aa, Triticum aestivum
  misc_feature (50)..(50): Xaa can be any naturally occurring amino acid
MCGILAVLGCGDESQGKRVHVLELSRRLKHRGPDWSGLHQVADNYLCHQXRLAIIDPASGDQPLYNEDKSIAVAVNGEVYNHEELRARLSGHRFRTGSDCEVIAHLYEEYGESFIDMLDGVFSFVLLDARDNSFIAARDAIGVTPLYIGWGIDGSVWISSEMKGLNDDCEHFEIFPPGNLYSSKEKSFKRWYNPPWFSEVIPSVPYDPLRLRSAFEKAVIKRLMTDVPFGV

SEQ ID NO: 12290 - protein, 1230 aa, Cryptococcus neoformans var. grubii
MNGFMPALRLHHTHSSSVSPTASNDAASSSPTSSQPHQLAAYSPLYATSPNRGSKITKGSSLSSSTAHHGLKYVRPSTSPLLKPPKGKSFSEYLGDWGSQELFTFLDIHKCGQYLAIFQENDINGKILLDLDVTALKSMGIDKISERVRLIGGIKDLRKRIADETIRAPFIQRCYPPERTLLPSLPSHSNVFLDKWDYSSSASRLGKGQIAFRPPPLDLQGHMPRKLLPHASQGIATIDTHDIRTTKPKIEAYIQQNPLGQPQSVPTKRSDSLTLCAPPSRNVRRRSPSSRHFEGRESQTDGFTILNMASDRQVPSSTMNSVTLGEDCHLQREEGLPLFLKVPQFRNTFASSHKTLIAGRGPLTRGDTISHQPSGPAIAGQDSPVNYRISKTVTTTKEASQGDLEHPFAVKSIGSQLGLLVGVSGMAHDPVTDGSKSKGKTSVPLTGTSSSDISAVNANSAALSLADLRRQLVKFINTEDDTIRTVNVMHVTSGEEILERALKKFGKWGTGMHSSPDVYGDEDGDETLEIDGWEVYTERTPDESSKPLSESSLLKTCTFHREGTAIQDKGLFLRKKQRLQKRKNIQHFFGETLPPPMSPTSPTLITGPHLGIVQGKSQLASEPAFSSSNRLSTLTNKGPNRASMISVMSGLGVPVINTLPSPQGNGLCPTGSVHSHKKKSMYNFFGHRPPSELISNHLADYFPSAKKSDVEKARHSLLRLSGDTVAYKKNGIDEGDNAPDHWSKPGNNQPPSLPPFEPSQDTLSDSLQAYASSTPVYLSRPKHNVALRRRRDSDSSSRSHTSVLMQTRRNRDRSDTASLLTVDEITAEVENRRASTIPKGDYIEETEDSSFIEGDTLPEYEESKGLLRTVCSDSNSIVDSGKSFQRDSDVDQQQELEDEEEDELDDEEEEEEEEKEDEDEQGKAFTSTGSKRIIKWIKGALIGAGSFGSVYLGMDAQSGLLMAVKQVELSAGSVKSEDRKKSMLSALEHEIELLKELQHENIVQYLDSSVDTNHLNIFLEYVPGGSVAALLNNYGAFEEGLVRNFVRQILTGLNYLHMRGIVHRDIKGANILVDNKGGIKISDFGISKKVENSLISGLRTNRPSLQGSVFWMAPEVVKQTSYSPKADIWSVGCLVVEMLTGTHPWADLTQMQAIFRIGSLARPAPPSDISVQADEFLRKTFEIEHAKRPTAAQLLKDPFIDSPRVRTTASNFISEAIVSEKMEVQVVEEM

SEQ ID NO: 12291 - protein, 404 aa, Escherichia coli
GKKITLQNGKLNVPENPIIPYIEGDGIGVDVTPAMLKVVDAAVEKAYKGERKISWMEIYTGEKSTQVYGQDVWLPAETLDLIREYRVAIKGPLTTPVGGGIRSLNVALRQELDLYICLRPVRYYQGTPSPVKHPELTDMVIFRENSEDIYAGIEWKADSADAEKVIKFLREEMGVKKIRFPEHCGIGIKPCSEEGTKRLVRAAIEYAIANDRDSVTLVHKGNIMKFTEGAFKDWGYQLAREEFGGELIDGGPWLKVKNPNTGKEIVIKDVIADAFLQQILLRPAEYDVIACMNLNGDYISDALAAQVGGIGIAPGANIGDECALFEATHGTAPKYAGQDKVNPGSIILSAEMMLRHMGWTEAADLIVKGMEGAINAKTVTYDFERLMEGAKLLKCSEFGDAIIK

SEQ ID NO: 12292 - protein, 327 aa, Triticum aestivum
MKTLLILTILAMAITIGTANIQVDPSGQVQWLQQQLVPQLQQPLSQQPQQTFPQPQQTFPHQPQQQVPQPQQPQQPFLQPQQPFPQQPQQPFPQTQQPQQPFPQQPQQPFPQTQQPQQPFPQQPQQPFPQTQQPQQPFPQLQQPQQPFPQPQQQLPQPQQPQQSFPQQQRPFIQPSLQQQLNPCKNILLQQSKPASLVSSLWSIIWPQSDCQVMRQQCCQQLAQIPQQLQCAAIHSVVHSIIMQQQQQQQQQQGIDIFLPLSQHEQVGQGSLVQGQGIIQPQQPAQLEAIRSLVLQTLPSMCNVYVPPECSIMRAPFASIVAGIGGQ

SEQ ID NO: 12293 - protein, 486 aa, Cycloclasticus oligotrophus
MQHINHFINGEFVSAVDGKSFEKRSPVDRRLIAQVSEGGKVDVDRAVHAARAALNGEWGAFTMEQRVEILYGVADEITRRFDDFVEAEMADTGQPKSIMTHAFIPRGAANFKIFADVIKNVPNESFQTTTPDGLGALNYAIRVPKGVVGVVSPWNAPFLLMTWKVGPALACGNTVVVKPSEETPLTTTLLGEVMNKVGVPKGVFNVVHGFGPDSAGEYLTHHPKVDAITFTGETTTGAAIMKAASEGMRDVSFELGGKNAGIVFADSDFDKAVDGIYKSSFLNSGQVCLGTERVYVERPIFDKFVEALKKKVEKVRHGRPDDENCNFGPMISHEHQAKVLSYYAKAVEEGATVVTGGGVPSIPEELKEGAWVEPTIWTGLAEDATVMKEEIFGPCCHIAPFDDEQQVINWANDTEYGLSTTVWTRDLSRAHRVAAKINVGITWINSWFLRDLRTAFGGSKQSGIGREGGVHSLEFYTETRNVCVKL

SEQ ID NO: 12294 - protein, 190 aa, Arabidopsis thaliana
MAFAGTTQKCMACDKTVYLVDKLTADNRVYHKACFRCHHCKGTLKLSNYNSFEGVLYCRPHFDQNFKRTGSLEKSFEGTPKIGKPDRPLEGERPAGTKVSNMFGGTREKCVGCDKTVYPIEKVSVNGTLYHKSCFKCTHGGCTISPSNYIAHEGKLYCKHHHIQLIKEKGNLSQLEGGGENAAKDKVVAA

SEQ ID NO: 12295 - protein, 446 aa, Mycobacterium tuberculosis H37Rv
MRALPAGRHFFRGSDGYEAARRGTVWHRRVPDRYPEVIVQAVSADDIVSAIRYATVNGHKVSVVSGGHSFAASHLRDGAVLLDVSRIDHASIDADKGRAVVGPGKGGSVLMAELEAQGLFFPGGHCRGVCLGGYLLQGGYGWNSRIYGPACESVIGLDVITADGAQIHCDADNHADLYWAARGAGPGFFGVVTSFYLKLYPRPATCGTSVYVYPFDLADEVFTWARAVSAEVDPRVELQALASRGEPSMGIDVPVISLASPAFADSPEEAEQALALFGTCPVVEQALVKVPYMPTDLPAWYDVAMTHYLSDHHYAVDNMWTSASAEDLLPGIRSILDTLPPHPAHFLWLNWGPCPPRQDMAYSIEADIYLALYGSWKDPADEAKYADWARSHMAAMSHLAVGIQLADENLGARPARFASDAAMAKLDRVRAEYDPDGLFNSWMGRI

SEQ ID NO: 12296 - protein, 496 aa, Burkholderia cepacia R18194
MTPFDTSLVPDGNILIGGEWRRGRGTPFASIYPADQSVNMEVSTANAEDAAEAVVAADAAWRRADWAGLKPHQRAQVLYRIADLIMQRHEALANLQRRDNGKPIGETRVLVASAANTFRYFAACLETLDEELTPSRGDYLTMSVYEPIGVIAAITPWNSPIASDAQKLAPALAGGNAVVLKPAEVTPLVSLALARICEEAGVPKGVLSVLPGKGSVIGDVLVRHPLVKKVSFTGGTEVGRGIARIAAEKLMPVSLELGGKSPTIVCDDADLDHAVNGVLYGIFSSSGEACIAGSRLFVQRAVYDEFMTRLVAGARKLRVGDPTRPDTQMGPLITAKHRESVERYVALGLEEGGRLLCGGERPSGDGRENGFFYQPTILEGLPNSARICQEEIFGPVLVAMPFDDEASLIAQANDSVFGLAAGIWTRDYKRAWRIARALETGTVWINTYKLFSISTPFSGWKESGMGREKGRLGIREYMQQKSLYWGLNDAPLPWAN

SEQ ID NO: 12297 - protein, 395 aa, Campylobacter jejuni
MKMDYKEQSHIVPAYKRFDIVLEKGQGVYLFDDKAKKYLDFSSGIGVCALGYNHAKFNAKIKAQVDKLLHTSNLYYNENIAAAAKNLAKASALERVFFTNSGTESIEGAMKTARKYAFNKGIKGGQFIAFKHSFHGRTLGALSLTANEKYQKPFKPLISGVKFAKYNDISSVEKLVNEKTCAIILESVQGEGGINPANKDFYKALRKLCDEKDILLIADEIQCGMGRSGKFFAYEHAQILPDIMTSAKALGCGLSVGAFVINQKVASNSLEAGDHGSTYGGNPLVCAGVNAVFEIFKEEKILENVNKLTPYLEQSLDELINEFDFCKKRKGLGFMQGLSLDKNVKVAKVIQKCQENALLLISCGENDLRFLPPLILQKEHIDEMSEKLRKALKSF

SEQ ID NO: 12298 - protein, 375 aa, Zea mays
MAAASWSAPTTSFAPAPAPPWGPWRTKAAPLPIRTLPRRVLLNAVGESAMVAAGDTLLGLYEKERLGLLQYADDESKEERYWETLDADLRYWTRSLRPVQWYPGHIAKTEKELKEQLRLMDVVIEIRDARIPLSTSHPKMDSWLGNRKRIIVLNRKDMISTEDMNAWATYFGNQGIKVVFSNGQLGMGTMKLGRMAKSVASVANTKRKEKGLLPRPVRAGIVGYPNVGKSSLINRLLKRRMCPAAPRPGVTRELKWVRFGTDLELLDSPGILPMRISDQTSAIKLAICDDIGERSYDFADVAAILVQMLIRHPAVGSEAFRRRYKIDVDSECGKTFVTKLSVHLFNGDTSQAAFRILSDYRKGKFGWVALERPPT

SEQ ID NO: 12299 - protein, 449 aa, Arabidopsis thaliana
MDKISGFSDDELLVKILSFLPFKFAITTSVLSKQWKFLWMRVPKLEYDEDSMYSFEYSFRYFLPKAKEVDSETYSIVSESGHRMRSFIEKNLPLHSSPVIESLRLKFFTEVFQPEDIKLWVEIAVSRCAQELSVDFFPKEKHNALLPRNLYTCKSLVTLKLRNNILVDVPHVFSLPSLKILHLERVTYGDGESLQRLLSNCSVLEDLVVELDTGDNVRKLDVIIPSLLSLSFGMSRYCAYEGYRIDTPSLKYFKLTDLSKTFSGLIENMPKLEEANITARHNFKKLLELVTSVKRLSLNIENNDAEALTAIYGDDIVFNELEHLNFHIHNAYWSELLYWLLKASPKLQNLEFDEQCSRDGTMGTLAVFWNQPNSVPQCLLSTLQTFEWSGYPGSVQGKDLATYILRKSRQLKIATISIGYGLDPQQKLKMEMDVKFSFRASPTCKRVFY

SEQ ID NO: 12300 - protein, 274 aa, Brassica napus
  misc_feature (230)..(230): Xaa can be any naturally occurring amino acid
  misc_feature (264)..(264): Xaa can be any naturally occurring amino acid
MDIFDNSDLEYLVDDFHGFSDSEDDEPFGEFDHKSEADSDFEDDLDPTQESDTSALEARNGKDIQGIPWERLNYSRDQYRYKRLQQYKNFEILFRSRQDLDKECLQVEKGKHFYDFQFNTRLVKSTIAHFQLRNLLWATTKHDVYFMKNYSLMHWSSLLQRSKEVLNVAKPIVPTMKQPGLLSQSISRVQISTMAVKDDLIVAGGFQGELICKRINEPGVAFCTVLHRFXNDITNSVDIYNAPSGSLRVITANNDCTVRVLDAXNFAFLNSFTL

SEQ ID NO: 12301 - protein, 403 aa, Sisymbrium altissimum
YQGVYPVKCNQDRFIIEDIVRFGSSFGFGLEAGSKPEILLAMSCFCKGNPEAFLVCNGFKDSEYVSFALLGRKLELNTVIVLEQEEELDLVIDLSQKMNVRPVIGLRAKLRTKHSGHFGSTSGEKGKFGLTTIQILRVVRNLRQLGMLDCLQLLHFHIGSQIPSTALLSDGVAEAAQLYCELVRLGAHMKVIDIGGGLGIDYDGSKSGESDLSVAYTLEEYAEAVVASVRFVCDQKSVKHPVICSESGRAIVSHHSVLIFEAVSAVKQHANPDDIQFLLEGEEVRAEYEDLYAAVMRGDRESCFLYVDQLKQRCVEGFKDGSLSIEQLVSVDGLCESVLKAIGASDPVQTYNINLSVFTSIPDFWGIDQLFPIVPIHKHDQRPGARGILSDFTCDSDGKIDKF

SEQ ID NO: 12302 - protein, 294 aa, Staphylococcus aureus subsp. aureus COL
MVIQWYPGHMAKAKREVSEQLKKVDVVFELVDARIPYSSRNPMIDEVINQKPRVVILNKKDMSNLNEMSKWEQFFIDKGYYPVSVDAKHGKNLKKVEAAAIKATAEKFEREKAKGLKPRAIRAMIVGIPNVGKSTLINKLAKRSIAQTGNKPGVTKQQQWIKVGNALQLLDTPGILWPKFEDEEVGKKLSLTGAIKDSIVHLDEVAIYGLNFLIQNDLARLKSHYNIEVPEDAEIIAWFDAIGKKRGLIRRGNEIDYEAVIELIIYDIRNAKIGNYCFDIFKDMTEELANDANN

SEQ ID NO: 12303 - protein, 258 aa, Arabidopsis thaliana
MFLQVHEIAFLFGLLGNIVSFGVFLSPVPTFYGIYKKKSSKGFQSIPYICALASATLLLYYGIMKTHAYLIISINTFGCFIEISYLFLYILYAPREAKISTLKLIVICNIGGLGLLILLVNLLVPKQHRVSTVGWVCAAYSLAVFASPLSVMRKVIKTKSVEYMPFLLSLSLTLNAVMWFFYGLLIKDKFIAMPNILGFLFGVAQMILYMMYQGSTKTDLPTENQLANKTDVNEVPIVAVELPDVGSDNVEGSVRPMK

SEQ ID NO: 12304 - protein, 205 aa, Sulfolobus islandicus
YSIAKLASHKLWNLLNTEPYIATFGALTGSQAVEMAKAGLKAIYVSGWQVAADNNLSNQTYPDLSLYPSNSVPNLVKRLNNALLRADQISWSEGKHDIDYLLPIVADAEAGFGGPIHAFELTKALIEAGAAGVHFEDQLAAEKKCGHLGGKVLIPISAFIRVLNAARLASDVLGVPIILIARTDALNAKYLSNDVDETDNQFLTG

SEQ ID NO: 12305 - protein, 297 aa, Zea mays
  misc_feature (78)..(78): Xaa can be any naturally occurring amino acid
  misc_feature (124)..(126): Xaa can be any naturally occurring amino acid
MAIATESRGSEDRASAHANEEKRWVLSDFEVGKPLGRGKFGHVYLAREKRSNQIVALKVLFKSQLKQSQVEHQLRREXVEIQSHLRHPNILRLYGYFYDQTRVYLILEYAAKGELYKELTRCKXXXERRTATYVASLARALIYLHGKHVIHRDIKPENLLVGVQGEIKIADFGWSVHTFNRRRTMCGTLDYLPPEMVEKAEHDYHVDIWSLGVLCYEFLYGVPPFEAKEHSETYRRIVKVDLKFPLKPFVSPAAKDLISQMLVKSSAQRLPLHKVLEHPWIVQNADPSGVYREGRSI

SEQ ID NO: 12306 - protein, 72 aa, Glycine max
MPLVLAKSDSIQIREVWNDNLEEEFALIREIVDDYPYIAMDTEFPGIVLRPVGNFKNSYDYHYQTPKDNVDM

SEQ ID NO: 12307 - protein, 403 aa, Stanleya pinnata
YQGVYPVKCNQDRFIIEDIVRFGSSFGFGLEAGSKPEILLAMSCFCKGNPEAFLVCNGFKDSEYVSFALLGRKLELNTVIVLEQEEELDLVIDLSQKMNVRPVIGLRAKLRTKHSGHFGSTSGEKGKFGLTTIQILRVVRNLRQLGMLDCLQLLHFHIGSQIPSTALLSDGVAEAAQLYCELVRLGAHMKVIDIGGGLGIDYDGSKSGESDLSVAYTLEEYAEAVVASVRFVCDQKSVKHPVICSESGRAIVSHHSVLIFEAVSAVKQHANPDDIQFLLEGEEVRAEYEDLYAAVMRGDRESCFLYVDQLKQRCVEGFKDGSLSIEQLVSVDGLCESVLKAIGASDPVQTYNINLSVFTSIPDFWGIDQLFPIVPIHKQDQRPGARGILSDFTCDSDGKIDKF

SEQ ID NO: 12308 - protein, 139 aa, Triticum aestivum
  misc_feature (30)..(30): Xaa can be any naturally occurring amino acid
  misc_feature (55)..(55): Xaa can be any naturally occurring amino acid
  misc_feature (65)..(65): Xaa can be any naturally occurring amino acid
  misc_feature (67)..(67): Xaa can be any naturally occurring amino acid
  misc_feature (76)..(76): Xaa can be any naturally occurring amino acid
  misc_feature (87)..(87): Xaa can be any naturally occurring amino acid
  misc_feature (94)..(94): Xaa can be any naturally occurring amino acid
  misc_feature (96)..(96): Xaa can be any naturally occurring amino acid
  misc_feature (119)..(119): Xaa can be any naturally occurring amino acid
MSDSEEHHFESKADAGASKTYPQQAGTVRXKNGFHPSIKEPPCKFVEVLPPKTGXKHGPCQIHFXFXINIFQTGKXPEICPFVTQLXIFPHVNXTXYQLDLIYPKDGFVPSLLQNGNTXIFLTPNWSLWPLRRFLNCLL

SEQ ID NO: 12309 - protein, 118 aa, Oryza sativa (japonica cultivar-group)
MARAQLVLVALVAAALLLAGPHTTMAAISCGQVNSAVSPCLSYARGLRPSAACCSGVRSLNSAASTTADRRTACNCLKNVAGSISGLNAGNAASIPSKCGVSIPYTISPSIDCSRELI

SEQ ID NO: 12310 - protein, 173 aa, Prunus armeniaca
MEHEETGCQPHPEGPILCVNNCGFFGSVATRNMCSKCHKDMMLKEEQAKLAASSFGNIVNGTSNSNGNEPVVAAGVDVQAHLVEPKTISLQPSFSFGSGSGGSGEAKPEGPKRCGTCNKRVGLTGFNCRCGHLFCAVHRYSDKHDCPYDYHTAARDVIAKANPVVKADKLEKI

SEQ ID NO: 12311 - protein, 367 aa, Prunus persica
MGKGGMSSQGGALEAHVEQENMAAWLVGVNTLRIQPFKLPTVGPNDVRVKIKAVGICGSDVHYLKTMKCADFVVQEPMVIGHECAGIVDEVGSLVKNLVPGDRVALEPGISCWRCEQCKGGRYNLCPDMKFFATPPVHGSLANQIVHPADLCFKLPENVSLEEGAMCEPLSVGVHACRRANIGPETNVLVIGAGPIGLVSVLSARAFGAARIVIVDVDDERLSIAKSLGADDAVKVSTNPQDLEDEVSKISKAMKGGVDVSFDCVGFNKTMSTALSATRPGGKVCLVGMGHGVMTVPLTPAAAREVDVVGIFRYKNTWPLCLEFLRTGKIDVKPLITHRFGFSQKEIEEAFETSARGGNAIKVMFNL

SEQ ID NO: 12312 - protein, 206 aa, Schizophyllum commune
MALCGSSKGRGRGRPIQRKVVVCGDGACGKTSLLNVFTRGFFTQVYEPTVFENYVHDLYIDDQLVELSLWDTAGQEEFDRLRSLSYAETHVIMICFSVDNPTSLENVESKWLDEILEYCPGVKLVLVDSKCDLRDDPAVLDRLQRYGTHTDQYEEGLGVARRIRASRYLECSSKHNRGVNEVFLRGRARVTVHSIRQGSAGSCCVM

SEQ ID NO: 12313 - protein, 342 aa, Methanosarcina acetivorans C2A
MTKTAAVIKGDGVGPELVEAMLKVANAAGTDVEFVMCEAGAGWWEEHGGNSLVPDETWQILDSSDACFKGPTTTPGGIGSPRSVAVSIRRKYDLYANVRPIKTFPNSNAPLGDVEMVCVREGTEGLYIGEEIQLTDDVSIAIRKITRTASGKIARYAFEEAKRRGYDTVVPIHKSNILKLTCGSFLEEVEKVAQDYPNIEVWPYHIDNIAQQLIKNPQIFNKKVLLSTNLFMDVISEECSALVGSIGLIYSANLGDNFAMFEPAHGSAPKYAGLDKVNPVATVLAGAWMLDYLGEKEKSEAIFKATERVISEGKYVTYDVGGNAKLSQMADEIAKYTAEILK

SEQ ID NO: 12314 - protein, 367 aa, Glycyrrhiza echinata
MSDSYSTKDNNLFSTSSEQTEDGACLSAMRLVTNLVYPAVLNAAIDLNLFEIIAKATPPGAFMSASEIASKLPLPTQHSDLPNRLDRMLRLLASYSVLTCATRSTERVYGLSQVGKYLVPDGSRGYLASFTTFLCYPALMNVWLNFKEAVVDEDIDLFKKLHGVSKYEYMETDPKMNHIFNKSMADVCATEMKRILQIYKGFEGISTLVDVGGGNGQNLKMIISKYPLIKGINFDLPQVIENAPPIPGIELVGGDMFASVPQGDAMILKAVCHNWSDEKCLEFLSNCHKALSPNGKVIVVEFILPEEPEPTEESQLASTLDNIMFITVGGRERTQKQYENMCKLAGFSKFQVACRAFSSLGVMEFYK

SEQ ID NO: 12315 - protein, 290 aa, Glycine max
SWSISVFEQVKWIRVLYADFTAFIRDQEKLIFAEKAFDYVEGFVIINRTGLLNNWSSSFNPQDPVQASEFKSDGRTLFCLELAKYYNLEETLLVNQEVEKHLSRLNYIPSTLFLTEVTYVDFLDRVHTSEVKLRSKGLWDVPHPWLNLFIPKTKIHHFAEVVFGNIVTETSNGPVLIYPVNKSKWDNRTSVVIPEEDIFYLVAFLTSAVPSSNGTDGLEHILSQNKRILEFCERAQLGVKQYLPHYNTQQEWRAHFGPQWETFLLRKSVYDPLAILAPGQRIFQKAITFS

SEQ ID NO: 12316 - protein, 497 aa, Pseudomonas syringae pv. tomato str. DC3000
MTTLTRADWEQRAQNLKIEGRAFIQGEYTAAASGETFDCISPVDGRLLAKVASCDAADAQRAVESARSAFDSGAWSRLAPAKRKATMIRFAGLLEQNAEELALLETLDMGKPISDSLGVDIPGGARALSWSGEAIDKLYDEVAATPHDQLGLVTREPVGVVAAIVPWNFPLMMACWKLGPALSTGNSVVLKPSEKSPLTAIRIAQLAIEAGIPAGVLNVLPGYGHTVGKALALHMDVDTVVFTGSTKIAKQLMIYAGESNMKRVWLEAGGKSPNIVFADAPDLQAAADSAASAIAFNQGEVCTAGSRLLVERSIKDRFLPMVIEALGTWKPGNPLDPATNVGALVDTQQMNTVLSYIAAGHTDGARLVAGGKQILQETGGTYVEPTIFDGVNNAMRIAQEEIFGPVLSVLTFDTAEEAIQIANDTPYGLAAAVWTANLSKAHLTARALRAGSVWVNQYDGGDMTAPFGGFKQSGNGRDKSLHAFDKYTELKSTWIKL

SEQ ID NO: 12317 - protein, 205 aa, Triticum aestivum
  misc_feature (28)..(28): Xaa can be any naturally occurring amino acid
  misc_feature (100)..(100): Xaa can be any naturally occurring amino acid
PGIYLHSTPLAPPVMACSATSVGPFQGXLKSTAGLPVTRRSNGASLASVSHGGRIRCMQVWPIEGIKKFETLSYLPPLSTEALLKQIDYLIRSKCVPCLXEFSKVGFIFREHNASPGYYDGRYWTMWKLPMFGCTDATQVINEVEEVKKEYPDAYVRIIGFDNMRQVQCTSFIAFKPPPPEEKAPPSPAHSRQAIYKVPLQFCQL

SEQ ID NO: 12318 - protein, 180 aa, Glycine max
  misc_feature (137)..(137): Xaa can be any naturally occurring amino acid
MSGRVSGKVKWFNDQKGFGFITPDDGSEELFVHQSQIKSDGFRSLAEGESVEFAIESESDGRAKAVDVTGPDGASVQGTRRGGDGGRSYGGGRGGGYGGGGRGGGGGACYNCGESGHLARDCSQGGGGDRYGGGTEXNGRFGGDGKKRYGGGGGGGGGGGSCYSCGESGHFARDCPSSAR

SEQ ID NO: 12319 - protein, 208 aa, Glycine max
SGRDVACPQLGTRLEIISEHTLLLIFIILPLSIPNSLSEIRMASQSNTKSVHDFTVKDARGNDVNLADYKGKVLLLVNVASQCGLTNSNYTELNQLYEKYKGKGLEILAFPCNQFGAQEPGTNEEIVEFACTRFKAEFPIFDKVDVNGDNAAPLYKFLKSSKGGLFGDSIKWNFSKFLVDKDGNVVDRYAPTTSPLSIEKDIKKLLDA

SEQ ID NO: 12320 - protein, 243 aa, Zea mays
MFGYRKADPDLEAGGSSLLYPGMTESPELRWAFVRKIYVILTVQLAMTAAVSAFVVKVPAVSNFFVSSNAGIALYIFLIVLPFIVLCPLHYYHQKHPINLLLLGLFTVAISFAVGMTCAFTSGKIILEAAILTAVVVNSLTAYTFWAAKRGHDFNFLGPFLIAAIMVLMVFSLIQIFFPLGKISVMIYGGLASLIFCGYIIYDTDNIIKRHTYDQYIWAAVSLYLDVINLFLSLLQLLRAADS

SEQ ID NO: 12321 - protein, 277 aa, Glycine max
MPLVLAKSDSIQIREVWNDNLEEEFALIREIVDDYPYIAMDTEFPGIVLRPVGNFKNSYDYHYQTLKDNVDMLKLIQLGLTFSDEHGNLPTCGDESGTCCIWQFNFREFNVNEDVFANDSIELLRQSGIDFKRNNENGIDAHRFGELLMSSGIVLNDNVHWVTFHSGYDFGYLLKLLTCQDLPDTQVGFFNLINMYFPTVYDIKHLMKFCNSLHGGLNKLAELLEVERVGICHQAGSDSLLTSCTFRKLKDNFFSGSLEKYAGVLYGLGVENGQGSH

SEQ ID NO: 12322 - protein, 230 aa, Mycobacterium avium subsp. paratuberculosis str. k10
MSNNITWHEHKISRGEREQLNGHKGCVIWFTGLSGSGKSTVANVVEQKLYERGIRSYLLDGDNVRYGLNAGPDLLEERHGPEFAQRFGLGFSAQDREENIRRIGAVAKLFCEAGIIALTAFISPYVRDRDAIRATLDDGDFQEIFIDTPIEICEKRDPKGLYKKARAGEIKGFTGIDDPYEAPPRPELRLDGAAKDAETLAEEVIAHLERVGVIATDGLAHTRGRDEVTA

SEQ ID NO: 12323 - protein, 475 aa, Bordetella parapertussis 12822
MYEQLALYIDGEFLTGDGRRTQDVVNPATLEVLGQLPHASEADLDRALAAAQRAFETWKRTSPMERAAILRKVGQLSRDRAQEIGRNMTLDQGKPLAEAVGEVASCSEHADWHAEECRRIYGRVIPPRNPDVRQFVVREPIGVCAAFTPWNFPYNQAIRKIAAALGAGCTVVLKGPEDSPSAVMAIARMFHEAGLPKGCLNIVWGEPAKISDYLIRSPIVRKVSFTGSVPVGKQLAALAGAHMKRVTMELGGHSPVLVFDDADVDRAAEMLERFKVRNAGQVCVSPTRFYVQNGAYEQFLARFTEVLKNIKVGDGLEKGTDMGPLAHERRVPAMSTFVDDALKHGGKVVLGGDAPDRKGYFFSPTVVTELPDNAMLMTEEPFGPLAPVVRFTDTDEVLRRANSLPFGLSSYVFTNSLKTATKVSNALEAGMVNINHFGSALAETPFGGIKDSGIGSEGGLETFDGYLVTKYITHI

SEQ ID NO: 12324 - protein, 250 aa, Capsicum annuum
MGKCYPTVSEEYLKAVDKCKRKLRGLIAEKNCAPLMLRLAWHSAGTYDVCSKTGGPFGTMRFKTEQSHGANNGIDIALRLLEPIREQFPILSYADFYQLAGVVAVEVTGGPDVPFHPGREDKPEPPVEGRLPDATKGSDHLRDVFVKQMGLSDQDIVALSGGHTLGRCHKERSGFEGPWTANPLIFDNSYFKELLGGEKEGLLQLPSDKALLSDPAFRPLVEKYAADEDAFFADYAEAHLKLSELGFAEA

SEQ ID NO: 12325 - protein, 407 aa, Sporothrix schenckii
MSFSSMLSRLHGQPDSYDKKSKYHFGRMLGAGTYGIVREADGPTGKVAIKVILKKNVKGNEQMVYDELNLLQNLKHSHIVRFVDWFESRDKYYIVTELATGGELFDRICEQGKFTEKDASQTIKQVLSAVDYLHKNNVVHRDLKPENLLYLTKQSDSDLVLADFGIAKMLDSKDEVLTTMAGSFGYAAPEVMLKKGHGKPVDMWSMGVITYTLLCGYSPFRSENLPDLIEECTSARVIFHERYWKDVSEDAKDFIIGLLQPNPDDRWSSGDALKHKWLSGESATEHNLLPEIKAYMAKARLRRGIELVKLTNRIEALKMQEDDPENSDMQTDTAAPLQKAAAAAAAQDDGASGSVGAESGPTDKTKQTIQKVKGAIFREVVMAKVREMRQQEEVRKEVEEASKQGSP

SEQ ID NO: 12326 - protein, 127 aa, uncultured marine gamma proteobacterium EBAC20E09
MATSKDDILKAIEEMSVMDLVDLISAIEEKFGVTAAAAVAAAPAAAGGDGDAPAAEEKDEFDVVLSAAGDQKVQVIKAVRAITGLGLKEAKDMVDGAPSTLKEGVKKEEAEGMLAQLTEAGATGELK

SEQ ID NO: 12327 - protein, 388 aa, Salmonella enterica subsp. salamae
QNGKLNVPENPIIPFIEGDGIGVDVTPAMLKVVDAAVEKAYKGERKISWMEIYTGEKSTQVYGQDVWLPAETLDLIRDYRVAIKGPLTTPVGGGIRSLNVALRQELDLYVCLRPVRYYQGTPSPVKHPELTDMVIFRENSEDIYAGIEWKADSADAEKVIKFLREEMGVKKIRFPEHCGIGIKPCSEEGTKRLVRAAIEYAITNARDSVTLVHKGNIMKFTEGAFKDWGYQLARDEFGGELIDGGPWLKIKNPNTGKEIVVKDVIADAFLQQILLRPAEYDVIACMNLNGDYISDALAAQVGGIGIAPGANIGDECALFEATHGTAPKYAGQDKVNPGSIILSAEMMLRHMQWFEAADLIVKGMEGAIAAKTVTYDFERLMEGAKLLK

SEQ ID NO: 12328 - protein, 127 aa, Brassica napus
MAGMVFGLEAPMMTALQHLLDIPDGEAGAPAGEKQGPTRAYVRDARAMAATPADVKELPGAYAFVVDMPGLGSGDIQVQVEDERVLVISGERRREEKEDAKYLPMERRMGKLMRKFVLPGNADMEKI

SEQ ID NO: 12329 - protein, 292 aa, Zea mays
  misc_feature (124)..(124): Xaa can be any naturally occurring amino acid
  misc_feature (168)..(168): Xaa can be any naturally occurring amino acid
EDYYNPNFAVEDARGPREPWDDLHSKIDGPEAYDVLKNFEERWLKASKRSAAKKLSKLSRSHNDSLLWINKIPDIIAIDDEIYSNDDDPERWDVQIFRSIDSNSVKGFPKDPREATSKNLVCGXNVLIDMSVHTTYVNAIRGAQHFIYIENQYFLGSSFNWDSHRDVXKMTMQIMYEIIYKAMKEVGLDGTYEPQDYLNFFCLGNREAEDTTCTSSGPFSTTWISNQDQARNNRRFMVYVHSKGMIVDDEYVIIGSANINQRSMEGTRDTEIAMAAYQPQHTLANMLSAPRG

SEQ ID NO: 12330 - protein, 104 aa, Triticum aestivum
  misc_feature (19)..(19): Xaa can be any naturally occurring amino acid
  misc_feature (32)..(32): Xaa can be any naturally occurring amino acid
NTPTTKEAYYYRPVAEKFXFPRNAVRLTVPGXGPSVACSTAKAVEWDTAWSKLLDPSGRAGLGVHHSAYKQKAPGSVDPAVDDVSCSPAHDVKRLKTAVSAAAV

SEQ ID NO: 12331 - protein, 450 aa, Desulfovibrio desulfuricans G20
MTATRFESGSIVLDTTIPNLGPAKIPSPLSYCRFANEEQGLSLFLDHDQVEELGDEVVPLTFEPAGPRRHVYFDTSKTKCAIVTCGGLCPGINDVIRAIVMEAYHNYRVPAVLGIKYGLEGFIPRYGHDVVELTPALVGDIHQFGGTILGSSRGPQSPEEIVDALERMNVNILFMIGGDGTMKAVRSITGEINQRRLKISVIGIPKTIDNDINFISQSFGFETAVDKATEAIQCAHTEAVGAMNGIGLVKLMGRESGFIAAQATLSLKEVNFVLVPETPFTLHGEDGLLNALAQRLRERSHAVIVVAEGAGQHLLSGSHDTDASGNPILGDIATLLRTEIKSHFDKLGIPHTLKYIDPSYIIRSVPANANDRVYCGFLGQNAVHAGMAGKTGMVVAKLMDRYIHLPLDLVTSKRRKLNIISDFWRAVLESTGQSHLAGMVPPEARSCPRA

SEQ ID NO: 12332 - protein, 437 aa, Neurospora crassa
MAPSAGCEHTPMHLPALSTASSINASVLHGPRDLRLERRTIEEPELGELQVAVKTTGICGSDVSYYKKFANGDLCACMPLSLGHESSGVVVAIGPQVSGFSLGDRVALEVGVACGQCTICRKGRYNLCKKMRFRSSAKSVPHYQGTLQERINHPAIWCHILPDHISFDAAALLEPLSVGIHAVNRASPAPGSTALVLGAGTVGLLTAAMARQAGCTQVTITDVDQGRVDHAIFKGFATHGYLVPRSHHISSSSSSMFPNSNSNSSSGSSTPSDGIATPPSTLSFRSSLDSAKALAADVLTQTQNPVLDRDDEDIGVDVTFECTGKEVCMHTALYATRPGGKVIMVGMGTPIQTLPLSVAHLREIDILGVFRYANTYATGIRMLCNQKGSGAGFTLPSLDDMVTHRFKGLENAKGAFELASRTMDNEGNLVLKVVIEA

SEQ ID NO: 12333 - protein, 216 aa, Halobacterium sp. NRC-1
MRGQPVHRRSVLALVGGGAVSALAGCTDTTDGDATTTTPEPTPRSETQPTPTATDDIPIAGPSPDFGGLGLASNAFADGAAIPDRYTRSGADVNPPLSIAGVPEDAATLVLVVDDPDAVDPAGEVWLHWLVWNIPASRTRIPAAWTPTEPTVGTNDFGERDYGGPAPPDDTHLYRFKLYALDTTLILPQDATERTVGNAVRGHVLASTQLVGSHAP

SEQ ID NO: 12334 - protein, 507 aa, Caulobacter crescentus CB15
MTQVFPTPAAHAREILAKLGAPPLPADAGEPVRGPIDGAILGHVVYDDARQIEAKVAAACRAFADWRVVPAPRRGELVRLFGEELRAAKADLAALVTLEAGKIASEAAGEVQEMIDICDFAVGLSRQLHGLTIASERPGHAMRETWHPLGPVAVISAFNFPVAVWAWNACLALVCGDPVIWKPSEKTPLTALATQAILERALARFRDAPQGLSSVVLGARDAGERLARDPRIPLVSATGSTRMGRAVAPMVAERFGRSILELGGNNAMIVTPSADLSLALRAIVFSAAGTAGQRCTSLRRLIVHESLVDKVSDAVEAAFQRLSVGDPRDPKTLLGPLIDKAAYDAFIAAMNQVRAEGGSVAGGERVLIDEHPDAYYVRPALARLPAPAPCMQRETFAPLLHVVPYNSFDMAIAIQNDVPQGLSSCVMTNDVREAERFLAAAGSDCGIANVNIGPSGAEIGGAFGGEKETGGGRESGSDSWKQYMRRQTATVNYSGALPLAQGVRFDL

SEQ ID NO: 12335 - protein, 194 aa, Glycine max
MGFRFKSNPQLRRGLCCANDDKQQERSPSVIVIGGGMAGIAAARALQDASFQVILLESRERLGGRIHTDYSFGFPVDLGASWLHGVCKENPLAPLIGKLGLPLYRTSEDNSVLYDHDLESYALFDMDGNQVPQELVTKIGKIFGVILEETNNVREEFSEDMSILRALSIVFERKPELRLEGLSHQVLQWYYAEW

SEQ ID NO: 12336 - protein, 131 aa, Oryza sativa (indica cultivar-group)
MDATTTDATTAKRKRPAASDIADDAPTTVDEVSDAEVEEFYAILRRMRDATRRLGARPPPPRAPAWRPSFSWEDFADAPPKQAPPPPQQPADHERVAENATPPRRPAPGLDLNVEPPSDAPATPRSARAPA

SEQ ID NO: 12337 - protein, 469 aa, Streptococcus pyogenes M1 GAS
MVSVMWFRRDLRIDDQKALAHAIASQSPTLCVFQFNKEQLNLLHSRNQSSFITSVLAFRKLLKCEGIDLYLMYGDLMTCFEQLLTQLKDWTDVYFNYDESGYGRLRDQKAAQFFKKNGIAVHTYQDHYLHGSQEIINQSGQPYKVFTPYYRIWQNYPKETPIKVELSQGRWLNLETPDDVLRTVESFKDEKYQDVATFDEASKQLNRFIQDQLAAYHANRDFPAQLGTSRLSPFLRIGAIGIRTVYHAVRQAPNSLGQATFLKELAWRDFYNMVYVAYPDQKTQPIQKAFSQIEWVNNPDWFQLWKEGKTGYPIVDAAMLQLQKTGWMHNRLRMIVASFLTKDLLCDWRLGEQYFQQQLIDYDAASNIGGWQWAASTGTDAVPYFRIFNPVTQGKRFDPKGEFIKAYLPQLEHVPEKYLHEPWKMPKNLQESVSCIIGTDYPQPIVDHAKQREQAIAKYEWAKEKAKIE

SEQ ID NO: 12338 - protein, 153 aa, Medicago sativa
TTRKITLKSSDGETFEVDEAVALESQTIKHMIEDDCADSGIPLPNVTSKILAKVIEYCKKHVDAAAAEDKPNEDELKSWDSEFVKVDQATLFDLILAANYLNIKSLLDLTCQTVADMIKGKTPEEIRKTFNIKNDFSPEEEEEVRRENQWAFE

SEQ ID NO: 12339 - protein, 205 aa, Sulfolobus islandicus
YSIAKLASHKLWNLLNTEPYIATFGALTGSQAVEMAKAGLKAIYVSGWQVAADNNLSNQTYPDLSLYPSNSVPNLVKRLNNALLRADQISWSEGKHDIDYLLPIVADAEAGFGGPIHAFELTKALIEAGAAGVHFEDQLAAEKKCGHLGGKVLIPISAFIRVLNAARLASDVLGVPTILIARTDALNAKYLSNDVDETDNQFLTG

SEQ ID NO: 12340 - protein, 403 aa, Thellungiella salsuginea
YQGVYPVKCNQDRFIIEDIVKFGSSFRFGLEAGSKPEILLAMSCLCKGNPEAFLVCNGFKDSEYISLALLGRKLELNTVIVLEQEEELDLVIDLSQKMNVRPVIGLRAKLRTKHSGHFGSTSGEKGKFGLTTIQILRVVRNLRQAGMLDCLQLLHFHIGSQIPSTALLSDGVAEAAQLYCELVRLGAHMKVIDIGGGLGIDYDGSKSGESDLSVAYTLEEYAEAVVASVRFVCDQKSVKHPVICSESGRAIVSHHSVLIFEAVSAVKQHANPDDIQFLLEGEEVRADYEDLYAAVMRGDRESCFLYVDQLKQRCVEGFKDGSLSIEQLASVDGLCESVLKAIGASDPVHTYNINLSVFTSIPDFWGIDQLFPIVPIHKLDQRPGARGILSDFTCDSDGKIDKF

SEQ ID NO: 12341 - protein, 329 aa, Pyrococcus furiosus DSM 3638
MLKKSEEIEGTKVEGPWLDDTKSLEEVVSLYTQIGFQATHLGKAIEIWRKIEEKREKGEEIRVFLGYTSNIVSSGLREIIAWLVKHRKVDVIVTTAGGVEEDFIKALKPFILGDWIVNDAELRKKGINRIGNIFVPNDRYIEFEKYMIPFFERILEIEREKGRPLTASEFIYELGRFMDEKLGKEKEKSIIYWAYRNEIPIFCPAITDGSIGDMLYFFKEERRDRELIIDIANDIVKLNNLAVTAKETASIILGGSLPKHAIINANLFRGGSDYAIYITTAVPWDGSLSGAPPSEGVSWGKIRAKADYVEIWADATLVFPILVWMVMKR

SEQ ID NO: 12342 - protein, 134 aa, Zea mays
FGSRLSQKPKPKGVTFIFIIQSFQRSSFFFFSSESRKHALAEVKLRFCPSSGGVGEEHVRRNNNIDIDMARCFGLGSVLVLAALAASMVVLPLMLPPLPPPPLVLLFFPVGIMAALMLLAFSPSDQNGVVYAST

SEQ ID NO: 12343 - protein, 570 aa, Glycine max
  misc_feature (227)..(227): Xaa can be any naturally occurring amino acid
MCGILAVLGCVDNSQTKRARIIELSRRLRHRGPDWSGIHCYEDCYLAHQRLAIVDPTSGDQPLYNEDKTVIVTVNGEIYNHKQLRQKLSSHQFRTGSDCEVIAHLYEEHGEEFVNMLDGMFAFILLDTRDKSFIAARDAIGITPLYLGWGHDGSTWFASEMKALSDDCERFISFPPGHIYSSKQGGLRRWYNPPWFSEDIPSTPYDPTLLRETFERAVVKRLMTDVXPFGVLLSGGLDSSLVAAVVNRYLAESESARQWGSQLHTFCIGLKGSPDLKAAKEVADYLGTRHHELYFTVQEGIDALEEVIYHIETYDVTTIRASTAMFLMSRKIKALGVKMVLSGEGSDEIFGGYLYFHKAPNKKEFHEETCRKIKALHLYDCLRANKSTAAWGVEARVPFLDKEFINVAMSIDPEWKMIRPDLGRIEKWVLRNAFDDDKNPYLPKHILYRQKEQFSDGVGYSWIDGLKDHANKQVTDATMMAANFIYPENTPTTKEGYLYRTIFEKFFPKNAAKATVPGGPSVACSTAKAVEWDAAWSKNLDPSGRAALGIHDAAYDAVDTKIDEPKNGTL

SEQ ID NO: 12344 - protein, 75 aa, Glycine max
MADSDLSSSQISTHSTDSGNRGSSKVEFSEDEETLIIRMYKLVGERWSIIAGRIPGRTAEEIEKYWTSRFSGSSE

SEQ ID NO: 12345 - protein, 405 aa, Nasturtium officinale
YQGVYPVKCNQDRFIIEDIVEFGSKFRFGLEAGSKPEILLAMSCLCKGNPEAFLVCNGFKDSEYISLALLGKKLELNTVIVLEQEEELDLVIDLSQKMNVRPVIGLRAKLRTKHSGHFGSTSGEKGKFGLTTIQILRVVRKLRQVGMLDCLQLLHFHIGSQIPSTALLSDGVAEAAQLYCELVRLGANMKVIEIGGGLGIDYDGSKSGESDLSVAYTLEEYAAAVVASVRFVCDQKSVKHPVICSESGRAIVSHHSVLIFEAVSAGQQHETPSDVQFMLEGYSEEVRADYENLYGAAMRGDRESCLLYVDQLKQRCVEGFKEGSLSIEQLAGVDGLCESVIKAIGASDPVLTYNINLSVFTSIPDFWGIDQLFPIVPIHKLDQRPVARGILSDLTCDSDGKMDKF

SEQ ID NO: 12346 - protein, 436 aa, Oryza sativa (japonica cultivar-group)
MGFVESIGRYRVGRTIGAGTFAKVRLAVDADTGATVAVKVIDKRMVIRNNLMYQVKREITAMKLLNHPNIVKIYEVIATKTKICLVMEYVSGGQLSDKLSYLKRLDEKEAKKYFYQLIDAVDYCHRRGVYHRDLKPENLLVDNQGNLKVSDFGLSVLKKPGQFLSTSCGSPCYVAPEVIQHKSYDGAAADVWSCGVILFELLAGYLPFQDCSLTNLYRRISRAQFVFPQWLSVPQKKIIIRILDPSPITRAKISDIFDDKWLQDHCNPSARIENDDDCDVIEEASTDSDSSHNTEVKETEEMTAETDRFINAFQLIARCSDLDLSGLFQEQKTKLASPHPVQETFDKIKVAAKDVSMAVKRMNSSLVEIQDSKLLPRSNLDLTLSAEVIKVTPAHCVVEVSKSTGDLRSYKEFCRSLSSLLNGGQLSASSSDMECD

SEQ ID NO: 12347 - protein, 170 aa, Campylobacter jejuni
MINSPYIIWLTGLAGSGKTTIGQALYEKLKLKYKNLIYLDGDELREILGHYAYDRQGRIDMALKRAKFAKFLNDQGMMVIVTTISMFNEIYDYNRKQLKNYYEIYIECDMHELMQRDQKGLYTKALNKEIDNVVGVDIEFDKPEADLVINNSCRNNLEEKVELIIKKLAL

SEQ ID NO: 12348 - protein, 455 aa, Arabidopsis thaliana
MNLIRFLLVFQGKIQMNESRKKLNCQSRQFNVDKISDLPEDLLVHILSLLPTTNDIVATSGVSKRWESLWTKVHKLRFNDRIYDGKRYDSFLHFVEKSLILHKAPTLVSLRLSVGPKCTADDIGLWIKLALDRNICELIIKHYPDHGHIRLSRRLCDSKTLVSLKLKNAILGAIWLPTCFISLKTLHLRYVKYSGDESVRTLISSCPSLRNLVVKRHNEDNVKRFAIIVRYLQSLTVYLSPLHGVADSDAYVINTPNLKYLNIKDHYTDLCSFEDMPYLDEANLDVAFTHTENFFESLTSVKKLSLCLKKSNAQYPEGIIFSQLDHLELCTCDDSKWLNILAMLLPDSPKLRVLKLNDKNHDFVDKYCSCTWNQQPSYVPECLTKSLEIFEWRNYKATFRERDVAVYILKNSTCLKKTVISPKLKISGEICDHHIIREDLASLFMGSSSCELKFD

SEQ ID NO: 12349 - protein, 494 aa, Triticum aestivum
MSATCAADLGPLLGAAAANATDYLCNRFADTTSAVDSTYLLFSAYLVFAMQLGFAMLCAGSVRAKNTMNIMLTNVLDAAAGALFYYLFGFAFAFGTPSNGFIGKHFFGLKDMPQTGFDYSFFLFQWAFAIAAAGITSGSIAERTQFVAYLIYSAFLTGFVYPVVSHWIWSVDGWASAARTSGPLLFKSGVIDFAGSGVVHMVGGIAGFWGALIEGPRIGRFDHAGRSVALKGHSASLVVLGTFLLWFGWYGFNPGSFVTILKSYGPPGSINGQWSGVGRTAVTTTLAGSVAALTTLFGKRLQTGHWNVVDVCNGLLGGFAAITAGCSVVDPWAAVICGFVSAWVLIGLNALAGRLKYDDPLEAAQLHGGCGAWGIIFTALFAKKQYVEEIYGAGRPYGLFLGGGGRLLAAHIVQILVIAGFVSCTMGPLFLALKKLGLLRISAEDEMAGMDLTRHGGFAYVYHDDDEHDKSVGGFMLRSAQTRVEPAAAANSQV

SEQ ID NO: 12350 - protein, 232 aa, Zea mays
QSSVQNPKFVTNTTVRPLCIITASDVSHVQTAVRCGRWNGVRLRVRSGGHDYEGLSYRSVQPEVFAVLDLARLRGVQVRPGDDSAWVDAGTTLGELYYAVGTTNPGFLFPGGACATVGVSGFISGGGIGLMMRKYGVGGDNVVDARIVNANGDVLDRFAMGDDLFWAIRGGGGETFGVVVAWRLKLSKVPPTVTVVNVLRTMEQGAADLVAKWETTILQPPVLPDLTIRVVL

SEQ ID NO: 12351 - protein, 273 aa, Lactobacillus johnsonii NCC 533
MKHLTLNNGVKIPIFGFGTYEISPDQTKEAVLSAFKDGYRLIDTAQYYQNEQQVGEAVRASNLNRDEVFITTKTMTDGYEATKQGLDESLNKSGLDYFDLVLIHWPMGHDLDTWRALEEAYKAGKTRAIGISNFNSRQTLELINHAEIRPMVDQIETHLLLQQWKMHEFLKKENIIHESYSPLGNGQQNLMTNPVLQKIGEKYGKSPIQVILRYLVQNDIVTIPRSTNPAHIKANIDIFDFELDKEDLKQLCALDERKPIDGWPAEMREDEDY

SEQ ID NO: 12352 - protein, 236 aa, Oryza sativa (indica cultivar-group)
MRSNGVIPLDYALFRPLPPNKEAVDANTLLHYTNVFDAVVDAAYFAMAYLNVTNVPVMVTETGWPHKGDPSNEPDATSDNADTYNSNLIRHVMNTTGTPKHPGVAVPTYIYELYDEDTRPGSTSEKYWGLFDMNGIPAYTLHLTGSGVLLANDTTNQTYCVAREGADEKMLQAALDWACGPGKVDCSALMQGQPCYDPDNVEAHATYAFNAYYHGMGMGSGTCYFSGVAVITTTDP

SEQ ID NO: 12353 - protein, 443 aa, Haloarcula marismortui ATCC 43049
MLIRNATLPDGRQRDVRVRGESIAEVGRDLDASDQHVIEATGKRLFPGMIDVHVHFRQPGYPHKETWESGSRSAAAGGVTAVVDQPNTDPPTIDGESFDQKAEFAADSVVDWGINGGVTADWIPNVLLRRRLFALGEVFLADSTGDMGIEADLFADALEAATDNDVPVTVHAEDADYFNDDAKARDDADAWSAFRTAKAEEKAVERACEVAQKHDATIHIAHTSTPEGVDIASEAGMTTEVTPHHLLLSRRDLSELGTFGRMNPPLRREKRRQKLYERVVDGTVDMIATDHAPHTREEKDAGIWDAPSGVPGVETVLPLLLAEARDPDSGLTYERVRDLTARNPADVFDIPQKGAIEAGKDADLVLVDTTETSEISGAALHSKCDWTPFEGHDAVFPEWTMVRGTVVYERGDALEADDSTAQEDVFYDHQGENVRGADSERLE

SEQ ID NO: 12354 - protein, 341 aa, Salmonella enterica subsp. enterica serovar Typhi Ty2
MKALSKLKAEEGIWMTDVPEPEVGHNDLLIKIRKTAICGTDVHIYNWDEWSQKTIPVPMVVGHEYVGEVVGIGQEVKGFKIGDRVSGEGHITCGHCRNCRGGRTHLCRNTTGVGVNRPGCFAEYLVIPAFNAFKIPDNISDDLASIFDPFGNAVHTALSFDLVGEDVLVSGAGPIGVMAAAVAKHVGARHVVITDVNEYRLELARKMGVTRAVNVAKESLNDVMAELGMTEGFDVGLEMSGAPPAFRTMLDTMNHGGRIAMLGIPPSDMSIDWTKVIFKGLFIKGIYGREMFETWYKMAALIQSGLDLSPIITHRFSVDDFQKGFDAMCSGQSGKVILSWD

SEQ ID NO: 12355 - protein, 388 aa, Salmonella enterica subsp. VII
QNGKLNVPENPIIPFIEGDGIGVDVTPAMLKVVDAAVEKAYKGERKISWMEIYTGEKSTQVYGQDVWLPAETLDLIRDYRVAIKGPLTTPVGGGIRSLNVALRQELDLYVCLRPVRYYQGTPSPVKHPELTDMVIFRENSEDIYAGIEWKADSADAEKVIKFLREEMGVKKIRFPEHCGIGIKPCSEEGTRRLVRAAIEYAITNDRDSVTLVHKGNIMKFTEGAFKDWGYQLARDEFGGELIDGGPWLKIKNPNTGKEIVVKDVIADAFLQQILLRPAEYDVIACMNLNGDYISDALAAQVGGIGIAPGANIGDECALFEATHGTAPKYAGQDKVNPGSIILSAEMMLRHMQWFEAADLIVKGMEGAIAAKTVTYDFERLMEGAKLLK

SEQ ID NO: 12356 - protein, 481 aa, Streptococcus mutans
MPITNKTMLITYADSLGKNLKELNENIENYFGDAVGGVHLLPFFPSTGDRGFAPIDYHEVDSAFGDWDDVKRLGEKYYLMFDFMINHISRQSKYYKDYQEKHEASAYKDLFLNWDKFWPKNRPTQEDVDLIYKRKDRAPKQEIQFADGSVEHLWNTFGEEQIDLDVTKEVTMDFIRSTIENLAANGCDLIRLDAFAYAVKKLDTNDFFVEPEIWTLLDKVRNIAAVSGAEILPEIHEHYTIQFKIADHDYYVYDFALPMVTLYSLYSGKVDRLAKWLKMSPMKQFTTLDTHDGIGVVDVKDILTDEEITYTSNELYKVGANVNRKYSTAEYNNLDIYQINSTYYSALGDDDQKYFLARLIQAFAPGIPQVYYVGFLAGKNDLELLESTKEGRNINRHYYSSEEIAKEVKRPVVKALLNLFTYRNQSAAFDLDGRIEVETPNEATIVIERQNKDGSHIATAEINLQDMTYRVTENDQTISFE

SEQ ID NO: 12357 - protein, 488 aa, Listeria monocytogenes str. 4b F2365
MADVRKLKNYINGEWVESRADKYEDVINPATGEVLCQVPISTRAELDQAAVIAEQAFEKWSQVAVPRRARVLFSFQQLLIQHKEKLARLITLENGKNLSEARGEVQRGIENVEFAAGAPTLMMGDSLASIATDVEAANYRYPVGVVGGIAPFNFPMMVPCWMFPMAIALGNSFILKPSERTPLLMEKLVELFSEAGLPKGVFNVVYGAHDVVNGILENEIIKAVSFVGSKPVGEYVYKTGSANLKRVQALTGAKNHTIVLNDADLEDTVTNVISAAFGSAGERCMACAVVTVEEGIADEFLAALRTAAQNVKIGNGLDDGVFLGPVIREENQKRTIAYIEKGLEEGAKLTVDGRETGLSEGHFVGPTILEDVTTDMTIWKDEIFAPVLSVIRVKNLQEAVRVANQSEFANGACIFTNNAKAIRYFREKIDAGMLGVNLGVPAPMAFFPFSGWKSSFYGTLHANGKDSVDFYTHKKVVTARYSLKGYEE

SEQ ID NO: 12358 - protein, 388 aa, Salmonella enterica subsp. houtenae
QNGKLNVPENPIIPFIEGDGIGVDVTPAMLKVVDAAVEKAYKGERKISWMEIYTGEKSTQVYGQDVWLPAETLDLIRDYRVAIKGPLTTPVGGGIRSLNVALRQELDLYVCLRPVRYYQGTPSPVKHPELTDMVIFRENSEDIYAGIEWKADSADAEKVIKFLREEMGVKKIRFPEHCGIGIKPCSEEGTRRLVRAALEYAITNDRDSVTLVHKGNIMKFTEGAFKDWGYQLARDEFGGELIDGGPWLKIKNPNTGKEIVVKDVIADAFLQQILLRPAEYDVIACMNLNGDYISDALAAQVGGIGIAPGANIGDECALFEATHGTAPKYAGQDKVNPGSIILSAEMMLRHMQWFEAADLIVKGMEGAIAAKTVTYDFERLMEGAKLLK

SEQ ID NO: 12359 - protein, 181 aa, Brassica napus
MASSMLSSAAVATSPAQATMVAPFTGLKSSAAFPVTRKSNTDITSIANNGGRVSCMKVWPPVGKKKFETLSYLPDLTDVELAKEVDYLLRNKWIPCVEFELEHGFVYREHGSTPGYYDGRYWTMWKLPLFGCTDSAQVLKEVQECKTEYPNAFIRIIGFDNNRQVQCISFIAYKPPSFTGA

SEQ ID NO: 12360 - protein, 222 aa, Pseudomonas wisconsinensis
MSIRRLACSLLLSSLALPVLAAECPAMLQGELPKLRAKGENIELCQYAGKPLVVVNTASFCGFTPQFKGLEALYQRYKDQELEVLGVPSDDFRQESADSKETATVCYVNYGVTFAMTEPQPVSGANAIPLFKGLAEQSRQPRWNFFKYVVDRQGKVVASFSSLTKPDDPELIAARREGDRLATLIPSRFTALHPSGRWALSVCLPRLARRRTQFTRRALQEQ

SEQ ID NO: 12361 - protein, 205 aa, Sulfolobus islandicus
YSIAKLASHKLWNLLNTEPYIATFGALTGSQAVEMAKAGLKAIYVSGWQVAADNNLSNQTYPDLSLYPSNSVPNLVKRLNNALLRADQISWSEGKRDIDYLLPIVADAEAGFGGPIHAFELTKALIEAGAAGVHFEDQLAAEKKCGHLGGKVLIPISAFIRVLNAARLASDVLGVPTILIARTDALNAKYLSNDVDETDNQFLTG

SEQ ID NO: 12362 - protein, 153 aa, Brassica napus
VHNRCPTCRQELGDIRCLALEKVAESLELPCKFYNLGCPEIFPYYSKLKHESLCNFRPYGCPYAGSECGVVGDIPFLVSHLRDDHKVDMHAGSTFNHRYVKSNPREVENATWMLTVFHCFGQYFCLHFEAFQLGMGPVYMAFLRFMGDEEEAR

SEQ ID NO: 12363 - protein, 175 aa, Triticum aestivum
MAPTVMASSATSVVPFQGLKSTVGLPVSRRSNGASLGSVSNGGRIRCLQVWPIEGIKKFETLSYLPPISREALLKQVDYLIRSKWVPCLEYSKVGFIFREHNASPGYYDGRYWTMWKLPMFGCTDATQVINEVEEVTKEYPDAYVRIIGFDNMRQVQCVSFIAFKPPGCEESGKA

SEQ ID NO: 12364 - protein, 318 aa, Zea mays
  misc_feature (144)..(144): Xaa can be any naturally occurring amino acid
MMDPALLDDVIRRLLEVKNLKPGKNAQLSESEIKQLCAAAKEIFLHQPNLLELEAPIKICGDVHGQYSDLLRLFDYGGYPPQANYLFLGDYVDRGKQSLETICLLLAYKVKYPENFFLLRGNHECASVNRIYGFYDECKRRFSXVKLWKTFTDCFNCLPVSALIDEKILCMHGGLSPELNKLEQILNLSRPTDVPDTGLLCDLLWSDPSNEATGWAINDRGVSYTFGPDKVSEFLEKHDLDLICRAHQGGEDGYEFFASRQLVTMFSAPNYCGEFDNAGAMMSVDETLMCSFQILKPARKVLGGSTNNKSGFKSLRGW

SEQ ID NO: 12365 - protein, 476 aa, Triticum aestivum
  misc_feature (240)..(240): Xaa can be any naturally occurring amino acid
ENGREEVGVMGVSSGGADGDEEQHGGGKFSVTSFLWHGGSVWDAWFSCASNQVAQVLLTLPYSFSQLGMLSGILLQLFYGFLGSWTAYLISVLYVEYRSRKEKEGVSFKNHVIQWFEVLDGLLGPYWKAAGLAFNCTFLLFGTVIQLIACASNIYYINDRLDKRTWTYIFGACCATTVFIPSFHNYRIWSFLGLGMTTYTAWYLAIAALINGQVEGVTHTGPNKLVLYFTGATNILYTFXGHAVTVEIMHAMWKPAKFKYIYLLATLYVFTLTLPSASAMYWAYGDELLAHANAFSLLPKTAWRDAAVILMLIHQFITFGFACTPLYFVWEKVIGMHDTKSVCLRALARLPIVVPIWFLAIIFPFFGPINSAVGALLVSFTVYIIPALAHMLTYRSASARANAAEKPPFFLPSWTGMFVLNAFIVVWVFVVGFGLGGWASMVNFIRQINTFGLFAKCYQCPKPGAAVAPGPSSLHH

SEQ ID NO: 12366 - protein, 374 aa, Chlamydomonas reinhardtii
MHAALQIGGCSAAGFAPVRCGGRKASALATPVRGCQLGCGASAQSPMRAGAALGPRRSGRRTAVVCRAAAKNFYDILGVSASATDRDIKSAYRKLAMKLHPDVNKAPDAQKRFMEVKVAYETLSDAKQRAEYDRRLRGGYAGGRTGYSGSSSSSGYGGAYGGNSAGNWGSSYGTGGGNYGNYTQEPLPGLDDLIKELEKEYTAWVRERATKTGPGGRPKTLAEELEDLGGEFLDFLEEALGIKEEAGSSSSSSAGGNGSSSSTGAAAGAAFRETSKSAAEQFDAWWQQYGDGSPLGGAGGSSGAGASPAGSRSTSSGASASSSSSASSSSSQQRRQQAPPPPPPRPPPPPPPKKSREEEIDAELLALKKKLNKL

SEQ ID NO: 12367 - protein, 205 aa, Sulfolobus islandicus
YSIAKLASHKLWNLLNTEPYIATFGALTGSQAVEMAKAGLKAIYVSGWQVAADNNLSNQTYPDLSLYPSNSVPNLVKRLNNALLRADQISWSEGKRDIDYLLPIVADAEAGFGGPIHAFELTKALIEAGAAGVHFEDQLASEKKCGHLGGKVLIPISAFIRVLNAARLASDVLGVPTILIARTDALNAKYLSNDVDETDNQFLTG

SEQ ID NO: 12368 - protein, 422 aa, Staphylococcus aureus subsp. aureus MSSA476
MTAEKITQGTEGLNVPNEPIIPFIIGDGIGPDIWKAASRVIDAAVEKAYNGEKRIEWKEVLAGQKAFDTTGEWLPQETLDTIKEYLIAVKGPLTTPIGGGIRSLNVALRQELDLFTCLRPVRWFKGVPSPVKRPQDVDMVIFRENTEDIYAGIEFKEGTTEVKKVIDFLQNEMGATNIRFPETSGIGIKPVSKEGTERLVRAAIQYAIDNNRKSVTLVHKGNIMKFTEGSFKQWGYDLALSEFGDQVFTWQQYDEIVEKEGRDAANAAQEKAEKEGKIIIKDSIADIFLQQILTRPAEHDVVATMNLNGDYISDALAAQVGGIGIAPGANINYETGHAIFEATHGTAPKYAGLNKVNPSSVILSSVLMLEHLGWQEAADKITDSIEDTIASKVVTYDFARLMDGAEEVSTSAFADELIKNLK

SEQ ID NO: 12369 - protein, 142 aa, Streptococcus thermophilus
MLNKIQHRNLNTYSVTPFDFFEEFSRNLFNDFKPNFIKTDIHETDNEYLVEAELPGIPKENIQVTYENGVLTISGQRQIDAVNEDKKGKLIRSERSLTSVQRQYLLENVKEDEIKASYSDGVLKVTLPKDSNKEIKKSISIE

SEQ ID NO: 12370 - protein, 426 aa, Clostridium thermocellum ATCC 27405
MLIKGGHVVDPKTNTNGIMDILVEDGIITEIGKDIEISNGDIIYAEGKLVLPGLVDAHCHLRDPGFEYKEDIETGTMSAAMGGFTSIACMPNTDPVCDNKAVVKYIINKAKQDGYVNVYPIGAISKGQKGEELSEIGELKFAGAVAISDDGKPVKSSSLMKRALEYSSMFDIAVISHCEDLDLADGGVMNEGYWSTVMGLKGIPSAAEEIMVARDIILSEYTKVPIHIAHVSTELSVELIRNAKKRGVKVTCETCPHYFVLTDEACKDFNTLAKVNPPLRTRRDVEAVIEGLKDGTIDIIATDHAPHHADEKNVEFNLAANGMVGFETALPLAITYLVKPGHLTISQLVEKMCVNPSKLLGINKGTLETGRSADITIVDLNEEFVVDVNKFKSKSKNSPFHGFKLNGSVYYTLVNGNVVVREKVLL

SEQ ID NO: 12371 - protein, 256 aa, Triticum aestivum
MAAKCYPTVSDEYLAAVAKAKRKLRGFIAEKNCAPLMLRLAWHSAGTFDVATKTGGPFGTMKCPAELAHGANAGLDIAVRLLEPIKEQFPILSYADFYQLAGVVAVEVTGGPEVPFHPGRQDKPEPPPEGRLPDATQGSDHLRQVFSTQMGLSDQDIVALSGGHTLGRCHKERSGFEGAWTANPLIFDNSYFTELLSGEKEGLLQLPTDKTLLTDPAFRPLVDKYAADEDAFFADYAEAHLKLSELGFGEAVEGCC

SEQ ID NO: 12372 - protein, 396 aa, Yarrowia lipolytica
MTFHSLVNKVSGQPPSYNKKADYKFGKTLGSRYFGIVKYAKQHSTGEEVAVKIIVKKNLKGNDHVVIEELSLLKECHHPHIIAFKDWFESKEKFYIVTQLATGGELFDRICDYGKFTEKDARQSVKDILEAVDYLHSKDIVHRDLKPENLLFVTPDPHASLVLTDFGIAKHLKSPDEVLHSMAGSFGYAAPEVLKGTGHGKPCDIWSLGVITFTILSGYSPFRSETVRDFLEEIEGPNALVFHKKYWQDVSEDAKDFIKSCLALDPALRPTSAELLKHEWITGDTTKSIDLLPNIREGFNARSKFRQAIEAVRLHNRIKSLNMVDSDDEDEEEEAVADTEKPSLLSVASSMRPRAHSRSKSGTGAAAFQEVVLAAKRNKELLEKEKASKQDAAEEK

SEQ ID NO: 12373 - protein, 381 aa, Staphylococcus aureus subsp. aureus COL
MLTEQEKDIIKQTVPLLKEKGTEITSIFYPKMFKAHPELLNMFNQTNQKRGMQSSALAQAVMAAAVNIDNLSVIKPVIMPVAYKHCALQVYAEHYPIVGKNLLKAIQDVTGLEENDPVIQAWAKAYGVIADVFIQIEKEIYDQMMWIGFKPFKITNIKQESEDIKSFTVETEEYDFSEFTPGQYITVDVSSDKLPYRAKRHYSIVSGEKNHLTFGVKRDVTTEHEGEVSTILHDEIKEGDMINLAAPVGGFVLENTTEPQLFLGSGIGVTPLVAMYEAASAKGLDTQMVQVAENEQHLPFKDNFNSIASHHDNAKLYTHLKDKQGYIGAEELQVFLANKPEIYICGGTKFLQSMIEALKSLNYDMDRVHYETFIPRLSVAV

SEQ ID NO: 12374 - protein, 435 aa, Arabidopsis thaliana
MKAPRLGSEEVSYSDRISYLPDDLLLRILSFIHTSDAISTSLLSKRWKFVWKMMPTLDLDEDSCRNIGTLRFDEGCCMFLKSHEAPVLTSLNLKLMTPSHDIDRLLSNIKPILHEITITSYRYSTIRFPRNLNVCQTLVVMKLQDKVLVDVSFPVCFRSLKSLHLTRVKYSCRESFTTLLSACPVLEDLDLFIGRVHYDCLNSFTIWVPSLQRLSICDESYRFRSTTFEISVPSLKYLKIACQDSCFKFVEDMPNLVEAHVEANQHETKNLLRFLTSVERLKDPDLTDRIFHQLLYLELHLHKRLNGDRILSLLKHSPNLQTLKLNEKPLRSIKDQPNISVRKPNSVPECLTFHLETLEWQGYAGRPEDKEIAVYILGNALRLNTATISRYFSSSRFRHHQKKDLKIVEELKSITKASTSCQLVLQQFIEIKYSM

SEQ ID NO: 12375 - protein, 178 aa, Glycine max
MQHRNLTSGRPSGTDGSDYSYRMVVDSRYQLVAKGKKRLSLYFITEAVLLLIGVTLTYLPGIEADAPNTVAYSSVIVSVVSLIIGNIGRRRSRSGLLRFYAAVSSIAMLLLIASLAQQHLLLKAIQDSKLWKTGKYDVNELSHFQIGLLLYMVTLSVLKLCTVNAVVSLLFNMALNPH

SEQ ID NO: 12376 - protein, 388 aa, Salmonella enterica subsp. diarizonae
QNGKLNVPENPIIPFIEGDGIGVDVTPAMLKVVDAAVEKAYKGERKISWMEIYTGEKSTQVYGQDVWLPAETLDLIRDYRVAIKGPLTTPVGGGIRSLNVALRQELDLYVCLRPVRYYQGTPSPVKHPELTDMVIFRENSEDIYAGIEWKADSADAEKVIKFLREEMGVKKIRFPEHCGIGIKPCSEEGTKRLVRAAIEYAITNDRDSVTLVHKGNIMKFTEGAFKDWGYQLARDEFGGELIDGGPWLKIKNPNTGKEIVVKDVIADAFLQQILLRPAEYDVIACMNLNGDYISDALAAQVGGIGIAPGANIGDECALFEATHGTAPKYAGQDKVNPGSIILSAEMMLRHMQWFEAADLIVKGMEGAIAAKTVTYDFERLMEGAKLLK

SEQ ID NO: 12377 - protein, 291 aa, Lactobacillus johnsonii NCC 533
MTEVPTITLNDGNKMPLLGLGVFQIPDHEKARQTVEMALANGYRMIDTAEVYENQIAVGEAIAESAVNRDDIFLTTKIWVSNMSFEKATKAIDHDLKELGTDYLDLVLLHQPYGDTFGAWNALAAAKRAGKVRSIGLSNFYPDQYMNLELAHEDKPAINQIEINPWFQQTNDVKFFQGRDVVVEAWAQFAEGKHDIFNNKTLKEIADAHHKTTAQVILRWLTQQDIVVIPKSVHEKRQKENLDIFDFELTKDEMDKIKGLDKGVSQFFDHRDPAVIDDIFGESLKQLRDSE

SEQ ID NO: 12378 - protein, 337 aa, Streptomyces kanamyceticus
MSSRAIVVERPGAHRLVTRGTPTPGPGEVLVRVAAAGICGSDREVYDGHRDAAYVRYPVIPGHEWSGTVAAVGEGVDPGLLGRRTVAEGFRACGVCERCRCAETNLCTGGYAETGFTEPGAFADHLTVPARLLHLLRDDADLRAAALLEPAAVVAAAVRAGGLRPGERVAVVGAGTLGLLAVQLLAASGPGELVVVDPRGARGARARECGATSALSPVAAESVRGSFDLVVETAGAPTTAASSCLLARRGGRVVLTGMFTEGAVGIDPVHLSLSQLEVRSVFGASSAAWGDAVRAFGLGLIDPAALITHEFPLERFGEAVSLVGGGDPKTGKVLLRP

SEQ ID NO: 12379 - protein, 383 aa, Pyrus pyrifolia
MSSSNAVGATSHELLGAQAQLWNHIFQFINSMSLKCAVQLGIADVIHNHGQPISLSELIAGLNVHPSKAHFVSRLMLILVHSNFFAQHHHVHHDRADVEEEEAVVLYSLTPSSRLLLKDGPFSTTPFLLATLDPVVTTPFHLMGAWLKINGGDDPGATCTPFEMENGMPFWELGAQEPRFGNLFNEAMEADSKLIGRVVVEECGGVFEGLKSLMDVGGGSGTMAKAIANAFPNINCTVFDQPHVVAGLQGTTHNLGFMGGDMFEEIPPANAILLKWIMHDWNDEESVTILKKCREAISLSKNEGGNKKIIIIDIVVGYVDNKKKMMDKKSIETQLMFDMLMMSILPGKERSKLEWEKIFFSAGFTHYNITHTLGLRSLIEVYP

SEQ ID NO: 12380 - protein, 388 aa, Salmonella enterica subsp. diarizonae
QNGKLNVPENPIIPFIEGDGIGVDVTPAMLKVVDAAVEKAYKGERKISWMEIYTGEKSTQVYGQDVWLPAETLDLIRDYRVAIKGPLTTPVGGGIRSLNVALRQELDLYVCLRPVRYYQGTPSPVKHPELTDMVIFRENSEDIYAGIEWKADSADAEKVIKFLREEMGVKKIRFPEHCGIGIKPCSEEGTKRLVRAAIEYAITNDRDSVTLVHKGNIMKFTEGAFKDWGYQLARDEFGGELIDGGPWLKIKNPNTGKEIVVKDVIADAFLQQILLRPAEYDVIACMNLNGDYISDALAAQVGGIGIAPGANIGDECALFEATHGTAPKYAGQDKVNPGSIILSAEMMLRHMQWFEAADLIVKGMEGAIAAKTVTYDFERLMDGAKLLK

SEQ ID NO: 12381 - protein, 502 aa, Triticum aestivum
MVATAKIPQRQLFIDGDWRAPALGRRLPVINPTTEASIGEIPAGTSEDVDAAVAAARAALKRNRGRDWSRAPGAVRAKYLRAIAAKMIERKSDLARLEALDCGKPLDEAAWDMDDVAGCFEFFAGHAEALDKRQNAAVALPENFKCHLKKEPIGVVALITPWNYPLLMAVWKVAPALAAGCTAVLKPSELASLTCLELGDVCKEIGLPSGVLNIVTGLGHEAGAPLSSHPDVDKVAFTGSYATGQKIMVAAAPTVKPVTLELGGKSPIVVFDDVDIDKAVEWTLFGCFWTNGQICSATSRLLIHKNIAKEFVDRMVAWSKNIKVSDPLEEGCRLGPVVSEGQYEKIKKFVANAKSEGATILTGGVRPKHLEKGFFIEPTIITDINTSMEIWREEVFGPVLCVKEFSTEEEAIELANDTHYGLAGAVISGDRERCQRLAEEIDAGCIWVNCSQPCFCQAPWGGNKRSGFGRELGEGGIDNYLSIKQVTEYTSDAPWGWYKAPA

SEQ ID NO: 12382 - protein, 388 aa, Salmonella enterica subsp. arizonae
QNGKLNVPENPIIPFIEGDGIGVDVTPAMLKVVDAAVEKAYKGERKISWMEIYTGEKSTQVYGQDVWLPAETLDLIRDYRVAIKGPLTTPVGGGIRSLNVALRQELDLYVCLRPVRYYQGTPSPVKHPELTDMVIFRENSEDIYAGIEWKADSADAEKVIKFLREEMGVKKIRFPEHCGIGIKPCSEEGTKRLVRAAIEYAITNDRDSVTLVHKGNIMKFTEGAFKDWGYQLARDEFSGELIDGGPWLKIKNPNTGKEIVVKDVIADAFLQQILLRPAEYDVIACMNLNGDYISDALAAQVGGIGIAPGANIGDECALFEATHGTAPKYAGQDKVNPGSIILSAEMMLRHMQWFEAADLIVKGMEGAIAAKTVTYDFERLMDGAKLLK

SEQ ID NO: 12383 - protein, 324 aa, Streptomyces kanamyceticus
MAAQTLRAAARMRVVELIGDKERTAAEVAAEAGARPEGMIRLLRALAGIGVVAERTPGVFAVTPTGALLDSRRPGNVASLVLMMSDPTMLRGWEHLDEVVRTGEPAFDTVFGTDFFGHLREHPEESARFNEAMSQSTGAAAATLPRAFDFTRFATVADVGGGDGTLLSAVLKEHTGLTGIIYDTAEGLAQAPATLERHGLTERCSSVAGDFFQSAPKGADLYLLKSILHDWPDERAVTILSHCRAVLPPEGRVLILEHVLPEAVDPAAPGFAYLSDLNMLVNLGGRERTRADFDELCGRAGLSIVSVTPMGAPNPLSMIEVAAA

SEQ ID NO: 12384 - protein, 1265 aa, Neurospora crassa
MTWHAQLALVLALVCPAAASCSGKSDACSSNPIPLRQFNALNYQADTCNLKWNRGCTSLDKHGVLQQKPPPYSLCNSGHQPAGLIPVDAYTLSLQNNNFAPGSAKWTLHGLWPGSVDGTGGKNQPYGCLNGEGFNETILTTFDGLLNYFWPTNAKFNNTMQCFILSEWMKHGTCAVIPGADGTAFRLPQEDYFRTAFVIANEFNESPTLRNQLLEKVKLDDVEPLISTRCVQCAYLATVGWTGTDVASVPRMSGDCIDQCFECGDFWDTCPPAQLESTVMLNSSNAPREKRDSSSTSNATASFPLLEFAMPAFMSSENTSPWEGTWRSFGAEEGGSGKFEFAQTFTDNVLTVTTDSPYPRTCTYERRGPKELVLRCGGDHLEDCLVQRLPDIGGLEAAFLACNHTGEPAPASFYAAMDTKGCGNFLMFRCKASAAGCSFSPDAISASEPKTETKTEPESGFESESKPSPVSHFQPGIAGAPPALLGSWRSLQVSSDYEEGLAQWNFTADGQASLRWPNYPNRAVQRYSVSHSDEDPSLVLLASASGTITTCRFQFQYQPVYSYAVLDCGAAVDNEEVTQVTKWAMGRCNPCSAHCRYSCGPENDFCGAGSCDPAESVEAASVDALPSLFDITRATLKDGHDWCTPEDSGCWPTKTAIRKLEQELDPTVPRLGLRWHSYPDPQPAPVPMGSIDNQSFYGLGNAPQGLKALYYYEDIAEMQRPCFNQADPPAVYNTASDMCKAAVHQNEYRNWNPFIVVFPLNERHVVAALNFAARHRLCIATAGTGHEYNSRNSCPTGGILIRTILLKDKTFMPTWPEDSTLAPAGAFRFGAGSTFAEMHAFSKDYSRVISSGWCSTVGMVGFHLGGGHGPFAPSMGLGVDNVLEIEVLQVGRNTYGQPVVHKKIASRNRNPQLFWAMRGGGGSVWGVVLSMTIRAHPVPDGGLSRVYMSQTGTFCPDDSSKFGYQWLRGMWTRFTAWQLSLNQKVSTQPGFFINTTLYNEKRNLCSVTWEFKFEYFYAGGQAEQDYIRFRDGLKDVLQTDTVWEDNYKSAYDYLVSMAADKFTLVPVNPLPAQHPPSDVATGSQNSVLVSRQALKTKFTSTMMDVLDICVKSLKNPDKTSPDVSGYRCGFHYLYTSLTGNLGSTQPGDTAISPGFRSALMLWNARTLTTQQSNDTVYKLGPNSYFSESSYVMHNWTARYWGEKAYEQLLGVKKAHDPGNHFWCHHCVGDNPDDAFGEPLGAAAQADFGDQPDAAAQAEFVEQEKL

SEQ ID NO: 12385 - protein, 167 aa, Glycine max
  misc_feature (128)..(128): Xaa can be any naturally occurring amino acid
MAAAFASRCSRVGRSLSGGLSNSSPGLFTSSHGMTCNNLFSQQQRTFIQMRTVLKVVDNSGAKKVMCIQALKGKKGARLGDTIIASVKEAHPNGKVKKGKVVYGVVVRAAMILTFAGHSEVKFNDNAXVVLVMKSSVTSAICVFGPVPHELRQKKHVKILTLAGHIA

SEQ ID NO: 12386 - protein, 199 aa, Zea mays
  misc_feature (16)..(16): Xaa can be any naturally occurring amino acid
  misc_feature (29)..(29): Xaa can be any naturally occurring amino acid
  misc_feature (38)..(38): Xaa can be any naturally occurring amino acid
  misc_feature (47)..(48): Xaa can be any naturally occurring amino acid
  misc_feature (55)..(55): Xaa can be any naturally occurring amino acid
  misc_feature (63)..(64): Xaa can be any naturally occurring amino acid
  misc_feature (71)..(72): Xaa can be any naturally occurring amino acid
  misc_feature (74)..(74): Xaa can be any naturally occurring amino acid
  misc_feature (89)..(89): Xaa can be any naturally occurring amino acid
  misc_feature (116)..(116): Xaa can be any naturally occurring amino acid
  misc_feature (129)..(129): Xaa can be any naturally occurring amino acid
  misc_feature (132)..(132): Xaa can be any naturally occurring amino acid
  misc_feature (136)..(136): Xaa can be any naturally occurring amino acid
  misc_feature (141)..(141): Xaa can be any naturally occurring amino acid
  misc_feature (143)..(143): Xaa can be any naturally occurring amino acid
  misc_feature (149)..(149): Xaa can be any naturally occurring amino acid
  misc_feature (155)..(155): Xaa can be any naturally occurring amino acid
  misc_feature (169)..(169): Xaa can be any naturally occurring amino acid
  misc_feature (178)..(178): Xaa can be any naturally occurring amino acid
  misc_feature (183)..(183): Xaa can be any naturally occurring amino acid
  misc_feature (186)..(186): Xaa can be any naturally occurring amino acid
ESHTTGGESDQQKRPXPSGGPQAGAAGHXARSGAQQGXRAATAGPRXXDDGAGTXGSAGGKRXXEAGKTDXXEXEATDHSGGRKHKTNXAGSNDEAGANRAEGENGGKTNPSRPSXNATPKRRNGRTDXDYXAQNXDKEDXGXHEEDHXQKRSEXADSAEEKGEKHAAXAHARGRDDXTSPAXQRXNEHQPNGPATPAD

SEQ ID NO: 12387 - protein, 253 aa, Glycine max
LGHVIDKLSVSFGLEILKVVPGYVSTEVDARLSFDTAATIARAHRIIDLYEKAGIKKDRVLIKIASTWEGIQACKHLQKEGISCNMTLLFGFAQAVGCAEAGATLISPFVGRILDWHKAKTGKSSYESHEDPGVVSVTKIYQYYKKYDYKTIVMGASFRNTGEITELAGCDRLTISPGLLEELAKSTSKLDKKLDPETAAKAYTGEKVSYDEKGFRLSMNEDAMATEKLAEGIRGFSADIVKLEQILKAKLSA

SEQ ID NO: 12388 - protein, 182 aa, Burkholderia cepacia R18194
MLWLTGLSGAGKTTLADAVAARLSDRCMHPVVLDGDRLRTGLNRDLGFTVQDRFENVRRIAEVAALLSESGALAIVAVISPLAAMRDEAKAIVGPAFREVYVSTALACCETRDPKGLYAKARRGALPEFTGVSAPYEPPVAADLEIDTGRASLATCVDTLMQFACAQFVRAADARAALMRHG

SEQ ID NO: 12389 - protein, 345 aa, Methanosarcina mazei
MHHNVFTNTPTIPIDVKDRSVSELMDGMLRTGFQGRKLAESVQAWSNMLKEKDTTVLMGLSGAMVPAGMRRVISYLIRERMIDCLVSTGANLFHDSHEALGRKHYVGSHLANDEKLFEHGVDRIYDVFAVEEEFRNADNLIADFAEEIGEISCSSREFMYLLGKELVRRGAAEDSIVVSAYRHNVPIFVPALSDSSIGIGLTIARRRGLKLEIDQIKDVDEITQIVEKSGHTGVVYVGGGVPKNFIQQTEVIASILGMDVPGHEYAIQYTSDSPHWGGLSGCTFDEAVSWGKVAAQAKKVQVFVDATIALPIVAHALHEKTRGVKRTAPVFSWDGPEGLEIAYNE

SEQ ID NO: 12390 - protein, 290 aa, Brassica napus
  misc_feature (54)..(54): Xaa can be any naturally occurring amino acid
KKRPLFDTSNTWAFVFGLMGNGGSFAVFLSPVPTFYRVWKKKTTEGFQSLPYVXLFSATLWLYYATQKKDVFLLVTINSFGCFIETIYISIFLAFAPKKARMLTVKLLLLMNFGGFCLILLLCQFLAKGITRAKIIGRPTRPICVGFSVCVFAAPLSIIRTVIKTRSVEYMPFSLSLTLTISAVVWLLYGLALKDIYVAFPNVLGFALGALQMILYVVYKYCKTPPHLGEKEVEAAKLPEVSLDILKLSTVSSPEVRQANKCTCGNDRRPEVEDGQNAKNGKQSSSASAT

SEQ ID NO: 12391 - protein, 336 aa, Pyrococcus furiosus
MPKPKEYVLKKSEEIEGTKVEGPWLDDTKSLEEVVSLYTQIGFQATHLGKAIEIWRKIEEKREKGEEIRVFLGYTSNIVSSGLREIIAWLVKHRKVDVIVTTAGGVEEDFIKALKPFILGDWIVNDAELRKKGINRIGNIFVPNDRYIEFEKYMIPFFERILEIEREKGRPLTASEFIYELGRFMDEKLGKEKEKSIIYWAYRNEIPIFCPAITDGSIGDMLYFFKEERRDRELIIDIANDIVKLNNLAVTAKETASIILGGSLPKHAIINANLFRGGSDYAIYITTAVPWDGSLSGAPPSEGVSWGKIRAKADYVEIWADATLVFPILVWMVMKR

SEQ ID NO: 12392 - protein, 113 aa, Bartonella sp. Ac1692yn
ANEACLKMLQEIGSIKRIPEFIARAKDKNDPFRLMGFGHRVYKNYDPRAKIMQKTCHEVLKELNIQDDPLLDIAIELEKIALSDEYFIEKKLYPNVDFYSGITLKALGFPTEM

SEQ ID NO: 12393 - protein, 1188 aa, Neurospora crassa
MEWLSEFHTHLWKRAAEELNKNIKLINESDDPRIGSGRDGASGGTLSHSSGDNKDPASLSALGSTFVPVLVYAAICLLIFFTFRRISTRTYAPRTIAQLREPEHPAQTLPNGWIDWVKPFWKIDDDYILNNCSLDGYLFLRFLKILSVICFAGLAISWPILLPINATGGNLQRQLDKLTMGNIKLPSKYYAHVVVAWLFFGFVLFMVCRECIYYINLRQAYLLSPNMSNRLSARTVLFTCIPKPYLDEAKLRKLFGDSVKNIWIPKNTNYLRGLVEDRDDVAERLEKAEIELIKKANTVRMKNIREGKGAPPFAGEPAIDDLQSSKTSSSSLHESNESTQDGDLEKGTEPNPVRIRERRTEAPPIPVDEIETPALPGDDPGAPKKSKDDDLGPEYQHPYGYPASLPDVRGSVAALFVRANDRPHHRPLHNFGRRVDTIRWTRARLKVLNRDIWKLRRKFRAGDGQPLSSAFVEFDSQASAEAAYQILSHHQPMHMSPRYIGVRPEQVIWSSLRIRWWEQIMRQFLMLALVVVAIIFWSIPSAAVGIISNIDFLSEKVPFLFWIPLLPKVILGVIKGLLPAVALSMLMAIVPAGLRVCARVAGCPSHALVELYCQSAYFAFQVIQVFLVTTITSAASAAIIDVIKQPMSAPNLLAQNLPKASNFYLSYILVQCLGAGAGKLANVSDLLRHYVATSFMVDPRKAYHRWRKLTPIHWGAVYPRFTNMGVIALAYSCISPLILVFAGFGMLFVGLVYRYNLIYIHDDSELDTKGLLYPRALLHLMVGLYIAEICLIGLFALKKAFGPMLLMILFFGFCAITHYSLSSALSPLLASLPQTLALEKQHGQIAEDGDGDDHDINPVSRPTPSDPTSAQGGGGLAADYYNDTSISTPGADIPAEVIGGSAADYYASISFDYSDPSTDDPEPPGLYDDDFDSDGPQSQRMRGLEGSSSIRHSITEFAKTTLKSQLSNLKASANGTGPPGRLSPFTRFLYRIHRFLTPDPSIQNPNLIQRWLHPSVYADFRTLAKKVGNGPGPDGWELPKGYENKRGYYPPEMWKPAPRLWIPRDTGRVSRQEVRHNRDAGVWCTDVGCWLDDGVGEAPWDDGKDKRGSSEDSEKGVEGENMRGTEAEPESKEGKAMDLEDGKKVNRKGIWKGVGKEAKKATGRVKPGRVRVRFNVEEGPMGEERWLF

SEQ ID NO: 12394 - protein, 483 aa, Acinetobacter sp. ADP1
MQHVQLLIDGQSVDAANQATFERISPIDGHVASVAAAATLEDVDRALESASRAFQIWSKVSPTERRLRLLKAADLMDQNTEKFIEIGMRETGSTATWYGFNVHLAANMLREAAAMTTQIDGSLIPSDVPGNLAMGIRVPCGVVVGIAPWNAPVILPTRALAMPLACGNTVVLKASEACPATHRLIGAILNEAGLGEGVVNVITHAPQDAPQVVERLIEHPAVKRINFTGSTKVGKIIAETAAKHLKPVLLELGGKAPVVILNDADLDEAVNAVAFGAFFNQGQICMSTERVLVQDGIADRFIEKLIQKTASLKAGNPTQQGSMLGVLESRRAAERIQHLLEDAQQKGANLPLGIQIQDTLMQPTLVLDIQPEMLLYREESFGPVCTVQRFASIEDGVRLANDSEFGLSSAVFSQNFGLAMDVAKQIDSGICHINGATVHDEAQMPFGGTKSSGYGRFGSKASIAEFTELRWITVQTQPRHYPI

SEQ ID NO: 12395 - protein, 447 aa, Methanosarcina acetivorans C2A
MTEIGIVAVGGYNEMGRNMTAIIIGEDIVILDMGLRLDRVQIHEDVEIDKMHSLELIEMGAIPDDTIMKEINGTVRAIVCTHGHLDHIGAIPKLAHRYNAPILATPYTAAIIKQQIESERKFEVCNRVIPLPAGGTYQVTEDISIEFIRVQHSIIDCILAAVHTPAGAVLYACDFKLDRTPTMGEAPDFDRFKSLGKEGVIAMITESTNAGRSGKTPSEQIAKDMVRDVLLGTEESDVGMIITTFASHIARLKAIIEAAEEMGRIPVLMGRSMERYVGAARDLGYLELPSNVEIYGMRKDIDRAFKRIMQDGKNKYLPIVTGHQGEPGSILVRVANGETPYTIEPGDRIIFSANVIPSPMTQANRYALETKLKMKGGRIYDNVHVSGHAYREDHWELLRMVNPEHVIPAHGDMEMHGHYIEMAEDAGYVLGDTVHLLRNGEVLYIEE

SEQ ID NO: 12396 - protein, 492 aa, Gibberella zeae PH-1
MAEITITGAGGRKIQIPTGLFINNRFIPSTTSETLTTENPTTNTPLGQVSAAQPSDVDAAVSSSKEALKTWKTSQPAERRRLLNRLADLIERDARELASIEAIDAGMLFNMSLGFCIVQAVETLRYFAGWADKIDGQSLEFDQGLAYTKREPIGVCAAVVPWNTPLLITAWKLGPALAAGNTLIIKTPELAPLYGQKLAQLVLEAGFPPGVVNIITGLGPVAGQALADHHQVRKISFTGSLAVGRTILVSAAKSNLKRVTLELGGKGPSIIFNDANFENALAFATAGITMHNGQICAAGSRIYVQADVYDRFVSEFAAKTRDAVMGDPLLDDTVKGPVISSTQKNRIMEYITKAKSEGIELLHGSAEPDSKGNFVPNTAFINVSPTATIMREEVFGPVASFAKFKTEEEVISLANDNEYGLAAAVFTNDISRAVRVSDQIEVGIVFVNTWGSISANSPFGGIKQSGFGRENGTDALNDWTQVKCVKINVFNL

SEQ ID NO: 12397 - protein, 178 aa, Zea mays
MASSMISSPAVTTVNRAGAGMVAPFTGLKSMAGFPTRKTNNDITSIASNGGRVQCMQVWPPIGKKKFETLSYLPDLDDAQLAKEVEYLLRKGWIPCLEFELEHGFVYREHNRSPGYYDGRYWTMWKLPMFGCTDASQVLKELQEAKTAYPNGFIRIIGFDNVRQVQCISFIAYKPPGF

SEQ ID NO: 12398 - protein, 76 aa, Triticum aestivum
MGLCSCCCRCLEIMCAILLPPLGVCLRHGCCSMEFWISVLLTILGYLPGVLYAAYVICSVDPDRVRRHDDDYIYVA

SEQ ID NO: 12399 - protein, 340 aa, Burkholderia fungorum LB400
MTLGDTIKGMVGMDPTGHADPDMKAVLDALRSLDPKPIEDCTVAEARQQPTPADAVRKLMSDPAFSARPSLELEAVRTEDIMIPGATGSNPARVYTPQGEGPFPLILYFHGGGWVLADLDTYDATPRSIAAQSRAIVVSAHYRQAPEHRLPAAHEDAFAAWRWVVEQAPKLCGDAGKIAVMGESAGANLAINVAIHARDTGVRMPMHQALIYPVASNNIVSISYEENRNARPLNKPMMLWFLHNVINSESDLTSSLIDVVSADLSRLPPAVVVTAGIDPLRSDGEKLAQKLHSAGVPVEHRNYRGATHEFFGMAAVVQAARDAQAFVSLAQRQAFGGAPL

SEQ ID NO: 12400 - protein, 343 aa, Mycobacterium tuberculosis H37Rv
MRIGVLTGGGDCPGLNAVIRAVVRTCHARYGSSVVGFQNGFRGLLENRRVQLHNDDRNDRLLAKGGTMLGTARVHPDKLRAGLPQIMQTLDDNGIDVLIPIGGEGTLTAASWLSEENVPVVGVPKTIDNDIDCTDVTFGHDTALTVATEAIDRLHSTAESHERVMLVEVMGRHAGWIALNAGLASGAHMTLIPEQPFDIEEVCRLVKGRFQRGDSHFICVVAEGAKPAPGTIMLREGGLDEFGHERFTGVAAQLAVEVEKRINKDVRVTVLGHIQRGGTPTAYDRVLATRFGVNAADAAHAGEYGQMVTLRGQDIGRVPLADAVRKLKLVPQSRYDDAAAFFG

SEQ ID NO: 12401 - protein, 664 aa, Zea mays
MSPSNPLPPPGETRVGCSLPSPVTPQAMGGGPARHVAMRALRARFLSRQREGGPAAASTWWWCASGSAKGDMESTLKGIRGSDAPCVLDLDDAATVAGGVEDTYGEDRATEEQLVTPWTVSVASGYNLLRDPRYNKGLAFTERERETHYLRGLLPPAIVSQELQERKIMNNIRQYQLPLQRYMALMDLQEGNERLFYKLLIDNVEELLPIVYTPTVGEACQKYGSIFSRPQGLYISLKEKGKILEVLKNWPERSIQVIVVTDGERILGLGDLGCQGMGIPVGKLSLYTALGGVRPSACLPITLDVGTNNEELLNDEFYIGLRQRRATGQEYTDFLQEFMTAVKQNYGEKVLIQFEDFANHNAFDLLARYGTTHLVFNDDIQGTASVVLAGLIAAQTLLGGSLADHTYLFLGAGEAGTGIAELIALEISRQTKAPIEECRKKIWLVDSKGLIVSTRKESLQHFKKPWAHEHKPLSNLLDAVNAIKPTVLIGTSGKGQTFTKDVVEAISSFNERPIILALSNPTSQSECTAEQAYTWSKGQAVFATGSPFDPVEYNGKIHVPGQANNAYIFPGFGLGVVMSGAIRVHDDMLLAASEALAQQVTEENFEKGLIYPPFSNIRKISAHIAASVAAKAYELGLASRRPRPKDLVKYAESCMYSPIYRNYR

SEQ ID NO: 12402 - protein, 145 aa, Vibrio vulnificus YJ016
MLRILNRTLLSTWLVLFVAFVSFSSQAQNENTSSNHVDLFQFHNVELQERAIRLSKELRCPQCQNQNLLESNAQVARDLRFIVYSQINDGKSDQEVVDFMTSRYGNMVLYNPPINSSTLLLWIFPVVILIIFFVISIRNIHTKRM

SEQ ID NO: 12403 - protein, 413 aa, Rickettsia sp. BJ-90
IAELKIRGKIFKLPILKASIGEDVIDISRVSAEADCFTYDPGFMSTASCQSTITYIDGDKGILRHRGYDIKDLAEKSDFLEVAYLLIYGELPSGEQYNNFTKQVAHHSLVNERLHYLFQTFCSSSHPMAIMLAAVGSLSAFYPDLLNFKEADYELTAIRMIAKIPTIAAMSYKYSIGQPFIYPDNSLDFTENFLHMMFATPCTKYTVNPIIKNALNKIFILHADHEQNASTSTVRIAGSSGANPFACISTGIASLWGPAHGGANEAVINMLKEIGSSEYIPKYIAKAKDKNDPFRLMGFGHRVYKNYDPRAAVLKETCKEVLKELGQLDNNPLLQIAIELEAIALKDEYFIERKLYPNVDFYSGIIYKAMGIPSQMFTVLFAIARTVGWMAQWKEMHEDPEQKISRPRQLYTG

SEQ ID NO: 12404 - protein, 414 aa, Shewanella oneidensis MR-1
MSDIRQQALDYHEFPVPGKTAVCLTKPAETSHDLALAYSPGVAEPVREIAANPENAYRYTNKGNTVAVISNGTAILGLGNLGPLASKPVMEGKALLFKHFANIDSTDIEVTHNTAQEFINTVAAIAGTFGGINLEDIKAPECFVIERELIARCNVPVFHDDQHGTAIVTAAGMINALEIQGKLISDAIFVCMGAGAAAIACMTMLVKCGANRANIYMLDTKGVIHSGRTDLNEYKALFANETDKRTLQDVIKGADVFLGLSGPNVIGAEEVAMMADKPVIFACSNPDPEIKPELAHATRSDLIMGTGRSDYPNQVNNVLCFPFIFRGALDVRASCINDEMKIAAVHAIAELAKEAVPASVLKAYPKVSSLSFGSEYVLPKPMDPRLLPRVARAVAKAAIDSGVATITTLPKYAD

SEQ ID NO: 12405 - protein, 75 aa, Glycine max
SGPICYQRNRAGAGMVAPFTVLKSMAGFPTRNTNNDITSIASIVGRVQCMHVCPPIVKKKFETLSYLSDLDYAQL

SEQ ID NO: 12406 - protein, 388 aa, Salmonella bongori
QNGKLNVPENPIIPFIEGDGIGVDVTPAMLKVVDAAVEKAYKGERKISWMEIYTGEKSTQVYGQDVWLPAETLDLIREYRVAIKGPLTTPVGGGIRSLNVALRQELDLYVCLRPVRYYQGTPSPVKHPELTDMVIFRENSEDIYAGIEWKADSADAEKVIKFLREEMGVKKIRFPEHCGIGIKPCSEEGTKRLVRAAIEYAITNDRDSVTLVHKGNIMKFTEGAFKDWGYQLARDEFGGELIDGGPWMKIKNPNTGKEIVVKDVIADAFLQQILLRPAEYDVIACMNLNGDYISDALAAQVGGIGIAPGANIGDECALFEATHGTAPKYAGQDKVNPGSIILSAEMMLRHMQWFEAADLIVKGMEGAIAAKTVTYDFERLMEGAKLLK

SEQ ID NO: 12407 - protein, 483 aa, Rickettsia rickettsii
MAEFTPITIAYGDGIGPEIMEAVLYILRKAEARIRLETIEVGEKLYKKHYTSGISEESWESIQRTGIILKAPITTPQGGGYKSLNVTIRKTLQLFANIRPAVSFHPFTRTLHPNLNLTIIRENEEDLYAGIEYRQTHNMYESMKLISHTGCEKIIRYAFEYAVKNNRKKVMCLSKDNIMKFSDGVLHKVFNEIAKEYPQINNAHYIIDIGTARLATKPEIFDVIVTSNLYGDIISDVAAEISGSVGLAGSANIGQHYAMFEAVHGSAPDIAGKDIANPSGLLNAAIMMLVHIGQGDIATLIENAWKKTIEDGVHTADIYNEQSSSKKVGTKEFAEEVTKRLGQLPTKLPKADYPLIAEKQESNIDYKIDTKEVKKLVGTDIFVNMNVSSAHDIADKINKLDLGNFELKTISSKGLKLWPRDTRFETVSDHWCCRFMNKDGTEIKHLDITRLLEALSTANIDFIKVENLFEFDGVAGYSLAQGE

SEQ ID NO: 12408 - protein, 388 aa, Citrobacter koseri
QNGKLNVPENPIIPFIEGDGIGVDVTPAMLKVVDAAVEKAYKGERKISWMEIYTGEKSTQVYGQDVWLPAETLDLIRDYRVAIKGPLTTPVGGGIRSLNVALRQELDLYVCLRPVRYYQGTPSPVKHPELTDMVIFRENAEDIYAGIEWKADSADAEKVIKFLREEMGVKKIRFPEHCGIGIKPCSEEGTKRLVRAAIEYAIANDRDSVTLVHKGNIMKFTEGAFKDWGYQLARDEFGGELIDGGPWVKIKNPNTGKEIVIKDVIADAFLQQILLRPAEYDVIACMNLNGDYISDALAAQVGGIGIAPGANIGDECALFEATHGTAPKYAGQDKVNPGSIILSAEMMLRHMQWFEAADLIVKGMEGAIAAKTVTYDFERLMEGAKLLK

SEQ ID NO: 12409 - protein, 92 aa, Glycine max
ATFTGLKSMAGLPIRKTNRVISCTASNGGRMQCMQVMSPLGTKKFETLSYMTDLDDAQSAKEVEYLFTKGWINCLEIQLEHRVLYLEHNMSP

SEQ ID NO: 12410 - protein, 476 aa, Bordetella pertussis Tohama I
MHANFIDGAWLDGVDARPNINPSNLADVVGDYAQADAAQAGMAIAAASAAAHAWARSTGQRRADVLDAVGTELLARKEELGRLLSREEGKTLPEGVSEVTRAGHIFKFFAGEALRIQGEKLPMTRPGIEVDVTREPVGVVGIIAPWNFPIAIPAWKIAPALAYGNTVVFKPADLVPGSAWALAEILSRAGLPAGVFNLVMGRGSVVGQAILDDRRVNAISFTGSVATGRRVAEAAIGRMAKVQLEMGGKNPLVVLNDADLKVAVDCAVNGAFFSTGQRCTASSRLIVQKGIYPRFVEAVRERLQGLKVDDALAPGTDIGPVVDRSQFDQNLAYIAIGREEGAQLAWGGEPLKRANEGYYLAPALFVDCDNSLRIAREEIFGPVAAVIPVDSYEQALEVANDTEFGLSSGIVTTSLRHATHFKRESQAGMVMVNCPTAGVDYHVPFGGRKGSSYGPREQGRHAAEFYTSVKTAYTAA

SEQ ID NO: 12411 - protein, 395 aa, Aspergillus nidulans FGSC A4
MSGQQDNAPPSSATNAVLVASEPVPEGTHKVSGVDFEKYQGRDITVAEMVDNMKHMGFQSSAVADAARIINEMCSFPQRAYRHPETGDKTTIFLGYTSNLISSGLRDTIRYLVRHRHVSAIVTTAGGVEEDLIKCLAPTYMGSFTAPGAGLRAKGLNRIGNLIVPNSNYCSFEDWLVPILDKMLEEQEAANKKARETGNEEDELHWTPSRIIERLGREINHEDSVLYWAAKNNIPIFCPALTDGSLGDMLYFHTFRASPLRLRVDIVDDLRRINTMAVRAARAGMIILGGGIVKHHIANACLMRNGAEHAVYINTAQEFDGSDAGARPDEAPPLHEQDNKVPLKRNPTIDNDNAQQIDSTQSAEHPRHTFGIRSPGSERTSRKAGVGTAREQNQR

SEQ ID NO: 12412 - protein, 664 aa, Zea mays
  misc_feature (632)..(632): Xaa can be any naturally occurring amino acid
MISARTAAASPASLWKQGGRSEGGGSCDGCRTYRNTLRRAAAAKVRALPSRAVEAVKMGSAAEMEQEEAEVAAAAAGVVVEDHYGEDSATEELPILPWAFSVARYVSFSWLKKYAEESYFYISGYTLLRDPHHNKGLAFMEKERDAHHLRGLLPPAVVPQELQIKKIMHNLRQYQVPLQRYMAMMDLQERNERLFYKLLIDNVEELLPVVYTPTVGEACQKYGSIFRQPQGLYVSLRDKGKVLEVLRNWPHRNIQVICVTDGEAILGLGDLGSQGMGIPVGKLALYTALGGVRPSACLPITIDVGTNNEKLLNDEFYIGLRQKRATGEEYHELMEEFMAAVKQIYGEKVLIQFEDFANHNAFNLLAKYSKSHLVFNDDIQGTASVVLAGLLAALKVVGRTLAEHTYLFLGAGEAGTGIAELIALEISKQTSAPIEECRKKIWLVDSKGLIVDSRKNSVQSFKKPWAHEHEPLTTLYDAVQSIKPTVLIGTSGVGRTFTKEVVEAMASFNERPIIFSLSNPTSHSECTAEEAYNWTQGRAIFASGSPFDPVEYDGKVFVPGQSNNAYIFPGFGLGLVISGAIRVHEDMLLAASEALAAQATQENFDKGSIFPPFTNIRKISARIAAAVAAKAXYELGLATRLPPPRDLVKYAQSCMYTPVYRNYR

SEQ ID NO: 12413 - protein, 304 aa, Brassica napus
  misc_feature (194)..(194): Xaa can be any naturally occurring amino acid
MVFVKPQKKQAYFKRYQVKFRRRRDGKTDYRARIRLINQDKNKYNTPKYRYVVRFTNKDIIAQIVSATITGDIVLASAYAHELPRYGLKAGLTNYAAAYCTGLLLARRVLQMLEMDAEYEGNAEATGEDYSVEPTDTRRPFRALLDVGLVMTTTGNRVFGALKGALDGGLDIPHSDKRFAGFNKEGKNLDAEIXHRKYIYGGHVADYMKLLMEDEPEKYQSHFSNYLKKDLAPENMEEMYKNVHAAIRADPSIKKSDKEAPKEHKRYNPKKLTYDERKASLIQRVKALNSAIGGDDNDEDEDDE

SEQ ID NO: 12414 - protein, 112 aa, Bartonella sp. Ac1825yn
NEACLKMLQEIGSIKRIPEFIARAKDKNDPFRLMGFGHRVYKNYDPRAKIMQKTCHEVLKELNIKNDPLLDIAMELEKIALNDKYFIEKKLYPNVDFYSGITLKALGFPTEM

SEQ ID NO: 12415 - protein, 453 aa, Methanopyrus kandleri AV19
MEPLTVEVFAVGGYGEAGGRNMTAVRVDEEIVIFDCGMSLDKSLVFEKDFQKASARELRRVKAIPNDPILRPHRSKTVAAVLSHAHLDHIGAVPKLLFKYKCPVFGTEFTIELVKADLRNEIRYADEAEDIMINLYTVEPGDEVQISSKLRLEFIPISHSIPCCVLPVLHTPYGAIVYACDFKFDDNQIIGYKPDYKRLKQLGKEGVLLLITESLRVAEEIKTPSESVAREMVNDVLRFADEESEGIIVTTFSSHIERIQAIADTADRLGRKVILAGRSMGKYGRIAEELGLLNLPAGARIYDRPETIRRGLERANKEKEDYLLIVTGHQGEPGAVLPRIVDGELPYRLTEEDSVVFSSSTIPSPINRANRYVLDTKLRLKGVKMFKDVHVSGHAGREDHRLMLRMLQPEFIVPAHGDPDMLAAYAELATQEGYEVNRDVFIMFDGTKLSLPL

SEQ ID NO: 12416 - protein, 329 aa, Emericella nidulans
MDNNMEIDAARSPEPHHLSPTTDPGSIPTLDGWIESLMTCKQLAEEDVRRLCDRAREVLQEESNVQPVKCPVTVCGDIHGQFHDLMELFRIGGPNPDTNYLFMGDYVDRGYYSVETVTLLVCLKIRYPQRITTLRGNHESRQITQVYGFYDECLRKYGNANVWKYFTDLFDYLPLTALIENQIFCLHGGLSPSIDTLDNIRSLDRIQEVPHEGPMCDLLWSDPDDRCGWGISPRGAGYTFGQDISEAFNHNNGLTLVARAHQLVMEGYNWSQDRNVVTIFSAPNYCYRCGNQAAIMEIDEHLKYTFLQFDPCPRAGEPMVSRRTPDYFL

SEQ ID NO: 12417 - protein, 112 aa, Bartonella sp. Ap1707yn
NEACLKMLQEIGSIKRIPEFIARAKDKNDPFRLMGFGHRVYKNYDPRAKIMQKTCHEVLKELNIQDDPLLDIAIELERIALSDEYFIEKKLYPNVDFYSGITLKALGFPTEM

SEQ ID NO: 12418 - protein, 112 aa, Bartonella sp. Ac1723yn
NEACLKMLQEIDSVKRIPKFIARAKDKNDPFRLMGFGHRVYKNYDPRAKIMQQTCHEVLKELNIQDDPLLDIAIELEKIALNDEYFVEKKLYPNVDFYSGITLKALGFPTEM

SEQ ID NO: 12419 - protein, 335 aa, Methanopyrus kandleri AV19
MAYKIAVIPGDGIGPEVIEAALHVIEPLIDAEFVEGEAGDECAEKHGDPLPEDTLELCHEADAILFGAAGETAADVIVRLRQELDLYANIRPVRGFPGLRELTGEPYVRDDVDFVIVRENTEGLYSGIEGRFRDTAYTLRIITEEGTRRIAEVACDLAEERGSNTVTCVHKANVMRETCGLFREVCKEVVESRGLEFEEYYVDAAAMFMITEPERFDVVVTPNMFGDILSDEAAALVGGLGLAPSGNVGDRHGLFEPVHGSAPDIAGKGIANPFATILSAVMMLEWLGEDEAAEAVREAVGEAIREGVVTPDLGGDKKTMEVAEFVREAALNRVQ

SEQ ID NO: 12420 - protein, 1165 aa, Gibberella zeae PH-1
MDLRNILDATDFYSNFTAALSTFSLDHLDSPTLNLQIIIQEGNSADGDRSGSLETNEEPILQSGHLLLSHKIPLRIGNGSCSIEPASPSLVSREPSPELRIPTNQRQVEIQRRTQSHKSHKRQGGLRLAAVNGDVPVEGDVDNANPRQMQVGQENFPKRVKVKHDGVFHPKESSLGKFVAGVWEQIHSGVILEPHVLTEQVQLTSRSSGNSPSGDLVSTAPSIRPDQTWESFNRSNIFCQRVTQASRTCRSIEVIVQARWVELFDSYVEYLASTNPNLSMTKCRMRAIAEACTDFGWTEKELRNKMGIWRGYKEIKDVLGWVALVFSGMGLYRLCKYRVDFDKDKFSRARTLGKRMEVAADTLHTNWRQLLAIVGESTEPRFAGHPHDWVVQQDGSDPVPLRSTYLAYDSNFTFEHLEESIIDTALWGADDPRWTPPSSAICLSGINVCDLCSEVQSNESAVNACKCFPNLFGVPRLPIAVQVFCTSNGRNNGLQALVAFERGTAIGEFVGLITKDIEEQDVMDSQAGGTRYQIWQGKQGNFTRFANHSCKPNAQFEKFVWLGTQHIVMNNTADIPLLFRFNMINRKIPLASYLFTRLKQAGTRRIYGVPGDFTLRALDHVPRSGIQFVGCCNELNAGYAADGYARAQRHRLQSGLGALITTYGVGELSAANAVAGSYAEHLPVVHIVGTPSQKARQVSTTSVGGRSPHLHIHHTLADSRIGVFREIAEKFTVAQLDLSGVDAEDVPTKVDEVLAKALYHSRPVYVELPSDAVETVVSSTLLERPIEERHTINDESSHLETREMADSLLQRLYAAKRPLILVDRGDGIETIRPDINEFVQKSGIPTLSLPSGASMVNNSLPNYFGVYSGSIGIVDLTSAVKSADLVLAFGCQFSDTQTLGWGVVPERNSMIMIGRNNIEDHQTGTGEILRMVTANLDKRSLAEQDTSSWGNFRHLPSQTVEPASPINQDEFYIHLNKYLKDDDNILLGNATPIIGGRDFVLPPSSQLIASGMWFSIGHMLPAAMGVSQAKADQGSSGRTILLDGDGSFQMTAQELSTIIHKRVNMVVFIINNSGYTYERYIHGMDEEYNDVAPWNYSLGPNLFGQAPDGYPIQSCRVHTWKELDSVLNSEGFSTGKGLTLVDIVIDKYDISERAKALFELVNKQL

SEQ ID NO: 12421 - protein, 386 aa, Vitis vinifera
MESTLAFNSGSNSMNQSFSSSAEFNSPVPETIPKSEEDTFVFATLLTSASVLPMALKSALELDLLEIIAKAGPGAFVSTSEIAAKITKRNPKAPVMLDRILRLLATYDVVKCSLRDSPDGGVERLYGLGPVCKYFTTNEDGVSVAPLLLMNQDKVPMQSKRYHLKDAVLDGGIPFNKAYGMTDFEYHGTEPRFNKVFNNGVSGHPTITMKKILEAYKGFEGLTSIVDVGGGTGATLNMIISKYPTIKGINFDLPHVIDDAPSYPGVEHVGGDMFVSVPKGDAIFMKWMCYEWDDAHCLKFLENCYQALPDNGKVIVAECILPVVPDTSLATKSAVHIDVIMLAYNTGGKARTEKEFEALAKGAGFQGFKVVCCAFNSWIMEFCKTA

SEQ ID NO: 12422 - protein, 292 aa, Lolium multiflorum
IELGLLEILVAAGGKSLTPTEVAAKLPSAANPEAPDMVDRMLRLLASYNVVSCLVEEGKDGRLSRSYGAAPVCKFLTPNEDGVSMAALALMNQDKVLMESWYYLKDAVLDGGIPFNKAYGMSAFEYHGTDPRFNRVFNEGMKNHSIIITKKLLELYHGFQGLGTLVDVGGGVGATVAAITAHYPAIKGVNFDLPHVISEAPPFPGVTHVGGDMFKEVLSGDAILMKWILHDWSDQHCATLLKNCYDALPAHGKVVLVECILPVNPEAKPSSQGVFHVDMIMLAHNPGGSQRY

SEQ ID NO: 12423 - protein, 292 aa, Schedonorus arundinaceus
IELGLLEILVAAGGKSLTPTEVAAKLPSAANPEAPDMVDRILRLLASYDVVTCLVEEGKDGRLSRSYGAAPVCKFLTPNEDGVSMAALALMNQDKVLMESWYYLKDAVLDGGIPFNKAYGMSAFEYHGTDPRFNRVFNEGMKNHSIIITKKLLELYHGFEGLGSLVDVGGGVGATVAAIAAHYPTIKGVNFDLPHVISEAPQFPGVTHVGGDMFKEVPSGDAILMKWILHDWSDQHCATLLKNCYDALPAHGKVVLVKCILPVNPEANPSSQGVFHVDMIMLAHNPGGNQRY

SEQ ID NO: 12424 - protein, 173 aa, Glycine max
  misc_feature (147)..(147): Xaa can be any naturally occurring amino acid
  misc_feature (149)..(149): Xaa can be any naturally occurring amino acid
  misc_feature (162)..(162): Xaa can be any naturally occurring amino acid
MCGILAVLGCSDSSQAKRVRVLELSRRLKHRGPDWSGLHQYGDNYLAHQRLAIVDPASGDQPLFNEDKTVVVTVNGEIYNHEELRKQLPNHTFRTGSDCDVIAHLYEEHGENFMDMLDGIFSFVLLDTRDNSFIVARDAIGVTSLYXGXWGLECSVVNSSEXKRFDDDCDTLE

SEQ ID NO: 12425 - protein, 514 aa, Glycine max
  misc_feature (398)..(398): Xaa can be any naturally occurring amino acid
MSKTTTSSEQTARNRLATLAAHLLPSDATSAAAILHPHRLSAPTGDLPPANLKGTLTVVDERTGKKYQIEVTPDGTVRASDFKKISSGKNDKGLKLYDPGYLNTAPVISRISYIDGDAGILRYRGYPIEDLAEKSTFTEVSYLIMYGNLPSESQLAEWEFAISQHSAVPQGVLDMIQSMPHDAHPMGVLVNAMSALSVFHPDANPALRGLDIYDSKQIRDKQITRVIGKITTIAAAVYLRMAGRPPVLPSNHLSYTENFLYMLDSFGNRSYKPNPRLTRALDIIFILHAEHEMNCSTSAVRHLASSGVDVYTAIAGAVGALYGPLHGGANEAVLKMLSEIGTVQNIPEFIEGVKARKRKLSGFGHRVYKNYDPRAKVLRKLAEEVFSIVGRDPLIEVXAVALEKIALSDEYFIKRKLYPNVDFYSGLIYRAMGFQPEFFTVLFAIPRMAGYLAHWRESLDDPDTKIMRPQQVYVGEWLRHYAPINQRTASSNTDKLGQLAVSNASKRRLAGSGA

SEQ ID NO: 12426 - protein, 448 aa, Bacillus subtilis subsp. subtilis str. 168
MTHDLIEKSKKHLWLPFTQMKDYDENPLIIESGTGIKVKDINGKEYYDGFSSVWLNVHGHRKKELDDAIKKQLGKIAHSTLLGMTNVPATQLAETLIDISPKKLTRVFYSDSGAEAMEIALKMAFQYWKNIGKPEKQKFIAMKNGYHGDTIGAVSVGSIELFHHVYGPLMFESYKAPIPYVYRSESGDPDECRDQCLRELAQLLEEHHEEIAALSIESMVQGASGMIVMPEGYLAGVRELCTTYDVLMIVDEVATGFGRTGKMFACEHENVQPDLMAAGKGITGGYLPIAVTFATEDIYKAFYDDYENLKTFFHGHSYTGNQLGCAVALENLALFESENIVEQVAEKSKKLHFLLQDLHALPHVGDIRQLGFMCGAELVRSKETKEPYPADRRIGYKVSLKMRELGMLTRPLGDVIAFLPPLASTAEELSEMVAIMKQAIHEVTSLED

SEQ ID NO: 12427 - protein, 196 aa, Glycine max
MAFAGTTQKCMACDKTVYLVDKLTADNRVYHKACFRCHHCKGTLKLSNYNSFEGVLYCRPHFDQLFKRTGSLDKSFEGTPKIAKPEKTGEEKPAATKVSSMFGGTRDKCAGCQKTVYPTEKVTVNGTPYHKSCFKCTHGGCVISPSNYIAHEGKLYCKHHHVQLIKEKGNLSQLEGDHEKSAEQEKINGEVVAAET

SEQ ID NO: 12428 - protein, 301 aa, Zea mays
LLASFPPLYPSNGWHVSATPLGVCFRSTRPTFYRIYKSKSTEGFQSVPYVVALFSAMLWIFYALIKSNETFLITINAAGCVIETIYVVMYFVYAPKKAKLFTAKIMVLLNGGVFGVILLLTLLLFKGSKRVVLLGWICVGFSVSVFVAPLSIMRRVIQTKSVEYMPFSLSLSLTLSAVVWFLYGLLIKDKYVALPNILGFTFGVVQMVLYVLYMNKTPVAATAEGKDAGKLSSAADEHVLVNIAKLSPALPERSSGVHPVTQMAGVPVRSCAAEATAPAMLPNRDVVDVFVSRHSPAVHVA

SEQ ID NO: 12429 - protein, 191 aa, Yarrowia lipolytica
MQTIKCVVVGDGAVGKTCLLISYTTNKFPSEYVPTVFDNYAVTVMIGDEPYTLGLFDTAGQEDYDRLRPLCYPQTDVFLVCFSVTSPASFENVKEKWFPEVHHHCPGVPCLIVGTQVDPRSDRMILDKLSRHKLRPMTTEQGYQLARELGAVKYVECSALTQKGLKDVFDEAIVAALEPPVVKKNKKCIVL

SEQ ID NO: 12430 - protein, 112 aa, Bartonella sp. Ac1727yn
NEACLKMLQEIGSIKRIPEFIARAKDKNDPFRLMGFGHRVYKNYDPRAKIMQKTCHEVLKELNIKDDPLLDIAMELEKIALNDEYFIEKKLYPNVDFYSGITLKALGFPTEM

SEQ ID NO: 12431 - protein, 187 aa, Griffithsia japonica
HEARSLRYASSAIRATASPRSLSTSASTSPQFTVTLFPGHGVGPEISVAVQNIFNAADVPIVWDEHHIDVDNAKPGQDLISADALDSLRRNRFGLKGPMATPIGKGYRSLNLTLRKALGLYANVRPCVSIPGVQTPYDDVDVVTVRENTEGEYSGLEHVVYPGVVESLKVITPERVNARVQVPFSII

SEQ ID NO: 12432 - protein, 101 aa, Zea mays
  misc_feature (33)..(33): Xaa can be any naturally occurring amino acid
RRLSVRDLKEKFAKGLSGACKLAEDGTLEKTRXLYRQVLLKKLINGLNTLKGRVAGRNRYNAVEAILLREALTVQLTQQEGELMYEKAEVKKWVIFLKQAT

SEQ ID NO: 12433 - protein, 182 aa, Triticum aestivum
MSDAPASPPGGGGGGGGGGSDDGGGGGGFGGVREQDRFLPIANISRIMKKAIPANGKIAKDAKETVQECVSEFISFITSEASDPGRREKRKTINGDDLLWAMATLGFEEYIEPLKVYLQKHRETEGDSKLPGKSGDVSVKKDALGPHGGASGTSAQGMGQQVAYNPGMVYMQPQYHNGDISN

SEQ ID NO: 12434 - protein, 347 aa, Methanocaldococcus jannaschii DSM 2661
MMKVCVIEGDGIGKEVIPEAIKILNELGEFEIIKGEAGLECLKKYGNALPEDTIEKAKEADIILFGAITSPKPGEVQNYKSPIITLRKMFHLYANVRPINNFGIGQLIGKIADYEFLNAKNIDIVIIRENTEDLYVGRERLENDTAIAERVITRKGSERIIRFAFEYAIKNNRKKVSCIHKANVLRITDGLFLEVFNEIKKHYNIEADDYLVDSTAMNLIKHPEKFDVIVTTNMFGDILSDEASALIGGLGLAPSANIGDDKALFEPVHGSAPDIAGKGIANPMASILSIAMLFDYIGEKEKGDLIREAVKYCLINKKVTPDLGGDLKTKDVGDEILNYIRKKLKGY

SEQ ID NO: 12435 - protein, 112 aa, Bartonella sp. Ap1699yn
NEACLKMLQEIGSVERIPEFIARAKDKNDPFRLMGFGHRVYKNYDPRAKIMQKTCHEVLKELNIQDDPLLDIAMELEKIALNDEYFVEKKLYPNVDFYSGITLKALGFPTEM

SEQ ID NO: 12436 - protein, 371 aa, Magnaporthe grisea 70-15
MAHLPNPSLQVTADHQLKQVEASILSPGPGEVLLHVKCTGVCGSDVHFWKTGAIGTLVVEGDCILGHEAAGIVLSTGQDVTTLKPGDRVAIEPGVPCNKCFLCSEGRYNLCQEVQFAGVWPYHGTLQRYKVHPARWLHKLPDSLSYAEGALLEPLSVVLHGIRVAGLSLGRGAVICGAGPIGLIALAAARASGAHPIVITDVEPRRLEFAREFVPSCQTYRVDPTQSPEENARGIRALFGLKGGAVPDPDEYSAPPVVLECTGVESSVCTAAFTARRGGIVVVIGVGKSTMNNLPFMHLSLAEIDLRFINRYRDTWPAGIACLESGILPDLKKLVTHVFPLEKAIEGLTLASDPRNGSIKVQIVDEVDISP

SEQ ID NO: 12437 - protein, 112 aa, Bartonella sp. Ap1714yn
NEACLKMLQEIGSIKRIPEFIARAKDKNDPFRLMGFGHRVYKNYDPRAKIMQKTCHEVLKELNIQDDPLLDIAIELEKIALSDEYFIEKKLYPNVDFYSGITLKALGFPTEM

SEQ ID NO: 12438 - protein, 195 aa, Gibberella zeae PH-1
MAVVATIKCVVVGDGAVGKTCLLISYTTNKFPSEYVPTVFDNYAVTVMIGDEPYTLGLFDTAGQEDYDRLRPLSYPQTDVFLVCFSVTSPASFENVREKWFPEVRHHCPGVPCLIVGTQVDLRDDPSVREKLSKQKMQPVRREDGERMAKDLGAVKYVECSALTQYKLKDVFDEAIVAALEPPAPKKKSHKCLVL

SEQ ID NO: 12439 - protein, 457 aa, Mesorhizobium sp. BNC1
MTDRSNELNAWDRDHFFHPSTHMGTHARGESPNRVVAGGEGVYITDVNGRTSLDAFAGLYCVNVGYGRQKIADAIAEQARNLAYYHAYVGHGTDASIRLAKMIIDRAPQGMSRVYFGLSGSDANETNIKLIWYYNNVLGRPEKKKIISRWRGYHGSGIMTGSLTGLDLFHNAFDLPRAPILHTEAPYYFRRPDRSMSEEQFSQYCADKLEEMILAEGPDTVAAFIGEPILGTGGIVPPPAGYWEKIQAVLKKYDVLLIADEVVTGFGRLGTMFGSDHYGIKPDLITIAKGLTSAYAPLSGVIVSDKVWQVLVQGSDKLGALGHGWTYSAHPLCAAAGVANLELIDEMNLVENAGTVGAYFRAELANAVGSHPNVGEVRGDGMLAAVEFVADRDDRVFFDASKKIGPQIAAALAERGVIGRAMPQGDILGFAPPLCLTKEEADKVIAATASAVDSVLG

SEQ ID NO: 12440 - protein, 497 aa, Mesorhizobium sp. BNC1
MNAATAKIDLSAKLDLLHDKSLLRELAYVDGRWVTGHEPVNFEVRDPATGAVLAYVASLNAAQVDSAIDAAARAFLSWKRLLPQERAATLRAWYELIVAAKEDLALLMTLEQGKPLAESRGEIDYAASFVEWYAEEAKRLNVESVTSHLPGAEMMVRREPLGVVGVVTPWNFPSAMLTRKAAAALAAGCTIVAHPSSETPLSALALAELGERAGLPAGVLNVVTGDAATIVGRMCGDSRIRAMSFTGSTEIGRLIAAQCAPTMKRLVMELGGHAPLIVFEDAPLDKAVDIAIGAKFATSGQDCLAANRIYVQRGIYGAFCEAFAARIATLKVSDGLDETGDIGPLMHERAIAKVEEQVTDALGRGARCLIGGERHPAGRLFYQPTLLADVPDAALIMREETFGPVAAAVPFDTEDEVVRRANNTEYGLVAYVVTENGARQLRMGRALDYGMVAINRVKITGAPIPFGGVKQSGIGREGARHGLEAFTDLKYLCLDAA

SEQ ID NO: 12441 - protein, 452 aa, Glycine max
  misc_feature (42)..(42): Xaa can be any naturally occurring amino acid
  misc_feature (143)..(143): Xaa can be any naturally occurring amino acid
  misc_feature (169)..(169): Xaa can be any naturally occurring amino acid
VGEACQKYGSIFMHPQGLYISLKEKGKIREVLRNWPEKNIQXVIVVTDGERILGLGDLGCQGMGIPVGKLSLYTALGGVRPSACLPITIDVGTNNEKLLNDELYIGLKQRRATGQEYAELMHEFMTAVKQTYGAKGPDLDEEXLGNRNAFTRLKNYSSTHVCFKDDIQXGTASVVLAGLVASLKLVGGNLADHRFLFLGAGEAGTGIAELIALETSKQTNAPLEEVRKNIWLVDSKGLIVSSRKDSLQHFKKPWAHEHEPVKNLLDAVNKIKPTVLIGTSGQGRTFTKEVIEAMASINKRPIILSLSNPTSQSECTAEEAYKWSQGRAIFASGSPFPPVEYEGKVFVPGQANNAYIFPGFGLGLIMSGTIRVHDDLLLAASEALAAQVSQENFDKGLIYPPFTNIRKISAHIAANVAAKAYELGLATRLPQPKDLVKFAESCMYTPAYRSYR

SEQ ID NO: 12442 - protein, 226 aa, Methanocaldococcus jannaschii DSM 2661
MSNEDLKLKVAKEAVKLVKDGMVIGLGTGSTAALFIRELGNRIREEELTVFGIPTSFEAKMLAMQYEIPLVTLDEYDVDIAFDGADEVEETTLFLIKGGGGCHTQEKIVDYNANEFVVLVDESKLVKKLGEKFPIPVEVIPSAYRVVIRALSEMGGEAVIRLGDRKRGPVITDNGNMIIDVFMNIDDAIELEKEINNIPGVVENGIFTKVDKVLVGTKKGVKTLKK

SEQ ID NO: 12443 - protein, 540 aa, Glycine max
MATRRLSLLLSRSLSSTSFQAASLLHSLGRNSGKWGNFNRFSTAAAVEDLITPQVPITYTKHLINGQFVDAASGKTFPTYDPRTGEVIAQVAEGDAEDINRAVSAARKAFDEGPWPKLTAYERCKIILRFADLVEKHGDELAALETWNNGKPYEQSATAELPTFVRLFRYYAGWADKIHGLTVPADGNYHVETLHEPIGVAGQIIPWNFPLLMFAWKVGPALACGNTVILKTAEQTPLTALYVAKLFHEAGLPPGVLNVVSGYGPTAGAALASHMDVDKLAFTGSTETGKVVLGLAAQSNLKPVTLELGGKSPFIVCEDADVDQAVELAHFALFFNQGQCCCAGSRTFVHEHIYDEFLEKAKARALKRVVGDPFKKGVEQGPQIDVEQFQKVLRYIKSGIESKATLECGGDQIGSKGFFVQPTVFSNVQDDMLIAKDEIFGPVQTILKFKDIDEVIRRSNATHYGLAAGVFTKNVHTANTLMRALRVGTVWINCFDVFDAAIPFGGYKMSGIGREKGIYSLNNYLQVKAVVSPVKKPAWL

SEQ ID NO: 12444 - protein, 1566 aa, Ustilago maydis
MSAATPTSPGFPLTMGTGVMAAHFAAPSSNAGSPRSRPTTPLSAGLTPSGPTYDDLGRWDDADVASWLNAARLGHYASIFAEHDIRGSVILDVDQAALKEMGITMVKDRVRISAAIKLLNKRCADSAVARRPSVVSISPLLPLASHPLYAHEGEIEYLQHDHTADPSADGSGSNFGLNSMGMRRGQMRPPPLTLKQSTSRGMPGYASPAGSINQSQGFGLSAARGLTPGAARGSVWNTASSSSATSKPGTPDGALHRKVNSIGGVAAPLAVGASSSLSSSRHPYGHAVHSNRPSTATGASGYSNVPASQSLRSNHTSSSPTATSFGSNINAASARPSTATGAQSYTTNVPGTSSARDGYSPLTPISESNSLGNTPTTPSGIQQQQQSAGYAVGRGPFASSQRYAASSVPSQQQPSSGHTLRHVDSGEGYNLAGYQNPNPPTLEDLKRRTIKFISEEDNTTRIVNVSDCRDAYDVMARVLKKFGKPPSGNSYTPTADQGPTGDELGATETWGIFATSADGQNTKALSDNELLAICHAPQPHDPLRERGLTLRRIPNHLPGEDARKVPVRSGRNKLEAFFGERMPVAQMQPAGPGSGVNADEEDAGSVTISGKKMKRASTVSIMSGLGVGPFSSSSHNTGAGHTHGSTRAEGKLLSKKESKHMSPPPVTSKPSKIRNFFGQRPPSELINTNLADFFPSTDSKALQRTARRSIYGRASASTRSKRNSTWSFVADPDAPPLPNKGSMDGHPTPLERSSISIRERGTTPVIQIGYDSRSEDDHQSNARRTSSGTHSHLHPSLTGPPTLPPVVSRDSLDEWSRDLKAVGSPVTEENAMFQSSRHGHASGSQQHHAAMKHYPSHASGYADRPSISRRASGESARSRRSLASQVRHGLSAARERNADTASLLTVDEITQEVENRRESISLAGAGGGWVVDEDGVPIPIPGSSSPFSSSAAASTRPSSGISSSYVHNGHLEHDDSEGHSDEEANQSSDLEEATRTRKARGVPSKAASIRTVASKRASSVLQAPGDESDRHLGDPMAVARSTTSRASSVSELRRSVHDHGDPSDGESGSDFTDSDLDSDGSETDEDEQANDVYLPSAKPAPIKWHKGALIGAGSFGNVFLGMNAKTGLLMAVKQVELPSGDSHLDQRKKGMLEALEREIKLLKSLEHENIVQYLDSFADDSHLNIFLEYVPGGSIVALLRNYGAFEEPLVRNFVRQILNGLSFLHNRGIMHRDIKGANILVDNKGGIKISDFGISKKVESDLVLATNKGGAGGGGAGGAAHRPSLQGSVFWMAPEVVKQTSYTIKADIWSLGCLVVEMISGTHPWAELNQMQALFQIGMGRKPSLPDEISNECRDFLEKTFELDYNNRPSADELLNHAFMGTEMTFPPSSGADGSGGGDDDAGGSGDAGDGDASTMGMTNDAETGTTRETRETKDGKRPTRSKSTRRLEREKRHKEAAAAAAAATALDTGTPNTPTSHTAAAAAAAAAASASASASASPAVASTSPAPGDAETGSPTNGKSAVPPAGSTGGTPESILTVSIATARGNSTSTALSAADAAFSEEADS

SEQ ID NO: 12445 - protein, 462 aa, Arabidopsis thaliana
MWRRSNLPGNPDSDQSISEEEEENDISPKENAKEQERGLLLQTKLEKLIGCGELNYARETGDVTLEATLRKISSSLEDVVEVPDSPEESYISSSRRTGLACISAQENGSDDEITHDEQVATWSAISKETKSLIHLNGVASVASSHLSGFRAKKSSNGLKDHGRPKFSFNSHTHGETSSKISDMAEIFEPDVEDQAIEEDPIIECPNSFDERSENRQGVSVAESREVLHECTKDAVPKLQEIPLDKIRLIKRSSELDSRHEAKSRKFTHKGNSSNFQDSDTDDELPGPMDSGSSSDDEPSYQSSVPNISNQKKQFVGDRFDEAIKASSLSKEGLLFGSPKLSGGSSLYGKLQQIMKQEKETEMEIMRKLQSGIGEAVMSRHLEGKLVVCKCSVIDLSGDSLLLKNTQALAAKETETTIIFSPKVCADVDIEIGNFIRVYAPWKELEVQKTNDVIILSSYFSSL

SEQ ID NO: 12446 - protein, 129 aa, Chlamydomonas reinhardtii
MGGCLEEQYLEVLAALHSDAVAAATLCRVFSSRERTEEVAFGLNTVFMLFSAALVFIMHGGFAMLEAGAIRSKNAMNILLQTVLDGAASAVMWYLVGFGFAYGIGDNPNGFIGDALFGLSRYSSHNTGT

SEQ ID NO: 12447 - protein, 305 aa, Hordeum vulgare subsp. vulgare
MKILIILTILAMATTFATSEMQVNPSVQVQPTQQQPYPESQQPFISQSQQQFPQPQQPFPQQPQQPFPQSQQQCLQQPQHQFPQPTQQFPQRPLLPFTHPFLTFPDQLLPQPPHQSFPQPPQSYPQPPLQPFPQPPQQKYPEQPQQPFPWQQPTIQLYLQQQLNPCKEFLLQQCRPVSLLSYIWSKIVQQSSCRVMQQQCCLQLAQIPEQYKCTAIDSIVHAIFMQQGQRQGVQIVQQQPQPQQVGQCVLVQGQGVVQPQQLAQMEAIRTLVLQSVPSMCNFNVPPNCSTIKAPFVGVVTQVGGQ

SEQ ID NO: 12448 - protein, 132 aa, Zea mays
  misc_feature (109)..(109): Xaa can be any naturally occurring amino acid
MLTNPLPLAAVTVSRMMAPLKHVRGLEFAADVGYVDFLSRVNRVEEEARRNGSWDAPHPWLNLFVSARDIADFDRAVIKGMLADGIDGPMLVYPMLKSKWDPNTSVALXGEVFYLVALLRFCRSGGPAVDEL

SEQ ID NO: 12449 - protein, 134 aa, Brassica napus
  misc_feature (92)..(92): Xaa can be any naturally occurring amino acid
MGERVKGTVKWFNVTKGFGFISPDDGGEDLFVHQSSIKSDGYRSLNENDAVEFEIITGDDGRTKANDVTAPGGGALSGGSRPVEGGGDRGGXGGYGGGGGGYGGGGGGYGGGGGGYGGGGGGYGGGGYGGGGGG

SEQ ID NO: 12450 - protein, 194 aa, Xylella fastidiosa 9a5c
MNMLNVLRFPVLALALALAFVSSGVLADAGSLLDLDYRPLAGKETVNLQRLYGGKVLLVVNTASKCGFTPQYEGLEALHQKLSPLGFAVLGFPSNDFKGQEPGDEQQIQKFCTLTYGVKFPMFQKVHVKGDEVTPLYQRLTQTTGVAPGWNFHKYLIARDGHVVAQFDSRTRPDDPILLEAIKRELAKPVQVAH

SEQ ID NO: 12451 - protein, 322 aa, Xanthomonas campestris pv. campestris str. ATCC 33913
MEFDPDVVRLFVQLQQAGQPPMEALPLQEARAMMRGMGVQLGFPRLPMAQVTDLQADTAAGTVPLRLYRPPGLNDTPAPTCLFVHGGGGVVGDLDSHDDVCRQLAARTPCQVLAVDYRLAPKHPAPAGVEDVIATLHWLAEHADAVGADPQRLAICGDSIGGGMAAVAAITAQQRGIALRCQLLLYPLTDARPDTGVHPSRGRNAEIPPLTRSAVQFFNRLLLPDMRLADHWHISVLLAPDVAGVAPALVVLADRDILHDEGLQYAERLRTAGVEVTQRTCVGMIHGFITMGGVIRAAEETIELAALMLRQRLLPVQPRFAA

SEQ ID NO: 12452 - protein, 451 aa, Methanococcoides burtonii DSM 6242
MTSINPANGTVNGEFEFHSPDEVDLILKRSSESFQYWSSLKGVERAVYIENVAKVLRSDKQELAETITMEMGKPIRQALAEVEKCASMFDHFATNICSLLEPDVVKESPSAFISYEPMGAVLAIKPWNFPLWQVLSAASHILAGGNTMVLKHSGYVPMCALNIESVFEKAGFPEGVFQTVLVDGPTASSLISRPEIAAVSFTGGLSAGQNVAEVAGRNMKKCVLELGGSDPFIVLEDADIEKAAKAGVAGRFLNTGQTCISSKRFIIESSVVDEFTSAFVENTRKLKIGDPLDADTDLGPLVRDKQVSLLEHQIYNAISMGAKVELGGGKVEGDGYYFSPVVLSNVSLYMQVMKEETFGPVAPIISVETESEALDVANATEFGLGASIWSGDKDKASLLASQVQSGVVGVNGFFKPEADLPFGGVKKSGIGRELSRFGFYEFMNIRSTVLF

SEQ ID NO: 12453 - protein, 112 aa, Bartonella sp. Em1712yn
NEACLKMLQEIGSVERIPEFIARAKDKNDPFRLMGFGHRVYKNYDPRAKIMQKTCHEVLKELNIQDDPLLDIAIELEKIALNDEYFVEKKLYPNVDFYSGITLKALGFPTEM

SEQ ID NO: 12454 - protein, 166 aa, Zea mays
  misc_feature (51)..(51): Xaa can be any naturally occurring amino acid
  misc_feature (103)..(103): Xaa can be any naturally occurring amino acid
  misc_feature (145)..(145): Xaa can be any naturally occurring amino acid
GRVQEHQEMLHCPSKAMDIENEIQVLCDQLAKKSSDSLRLLKELELHRSYXENDMPLYELKGLETLGSTLHIVVHDCASVDFWNSSIQWFRIQPEGSKKEIIXGTTKPAYAPEPHDVGRYTQAEVKSGGQTSITKIAGSVDPVSXAAGLVHYVEALVRRRETGYNV

SEQ ID NO: 12455 - protein, 362 aa, Triticum aestivum
MGSTAVEKVAVATGDEEACMYAVKLAAASILPMTLKNAIELGMLEILVGAGGKMLSPSEVAAQLPSKANPEAPVMVDRMLRLLASNNVVSCEVEEGKDGLLARRYGPAPVCKWLTPNEDGASMAGLLLMTHDKVTMESWYYLKDVALEGGQPFHRAHGMTAYEYNSTDPRANCLFNEAMLNHSTIITKKLLEFYRGFDNVETLVDVAGGVGATAHAITSKYPHIKGVNFDLPHVISEAPPYPGVQHIAGDMFKKVPSGDAILLKWILHNWTDDYCMTLLRNCYDALPMNGKVVIVEGILPVKPDAMPSTQTMFQVDMMMLLHTAGGKERELSEFEELAKGAGFSTVKTSYIYSTAWVIEFVK

SEQ ID NO: 12456 - protein, 226 aa, Triticum aestivum
  misc_feature (121)..(121): Xaa can be any naturally occurring amino acid
MKTLLILTILAMATTIATANMQVDPSSRVQWPQEQPPPQSQQPFSQQPQQIFPQPQQTFPHQPQQAFLQPQQTFPRRPQQQFPQPQQPQQPFPQPQQPQLPFPQQPQQPFPQPQQPQQPFXQSQQPQQPQQPFPQPQQQFPQPQQPQQSFPQQQQQLPQPQQPQQSFPQQQRSFIQPSLQQQLNPCKNILLQQCKPASLVSSLWSIIWPQSDCQVMRQQCCQQLAQ

SEQ ID NO: 12457 - protein, 585 aa, Triticum aestivum
  misc_feature (497)..(497): Xaa can be any naturally occurring amino acid
YQTRRPSNRFPLFSCSARLQSTLLASHRPIRWTAPPARGRLAVLSSHLLAAGADPAAALGRSPASAAAPGARAGVLAVVDSRTGKRYEVKVSEDGTVRATDFKKITTGKDDKGLKTYDPGYLNTAPVRSSICYIDGDEGILRYRGYPIEEVAESSSFVEVAYLLMYGNLPTQSQLAGWEFAISQHSAVPQGLLDIIQSMPHDAHPMGVLASAMSTLSVFHPDANPALRGQDLYNSKQVRDKQIVRVLGKAPAIAAAAYLRLAGRPAVLPSNNLSYSENFLYMLDSLGNKEYKPNPRLARVLDILFILHAEHEMNCSTAAVRHLASSGVDVFTALSGAVGALYGPLHGGANEAVLKMLNEIGAVENIPDFIEGVKNRKRKMSGFGHRVYKNYDPRAKVIRKLAEEVFSIVGRDPLIEVAVALEKAALSDDYFIKRKLYPNVDFYSGLIYRAMGFPTEFFPVLFAIPRMAGWLAHWKESLDDPDNKIMRPQQVYTGVWXLRHYTPVRERVASNQGEELGQIAASNATRRRRAGFFPVEQQQARMHGAASSPRNKPGCCRCPSQRRSGSSPGAVILLVSPRHLAVAMQ

SEQ ID NO: 12458 - protein, 292 aa, Oryza sativa (japonica cultivar-group)
MEHLERRGLAQGAYDGADPLDIGGFGDATGVDDAAEDVGDDLPLLDEVPAQDDLLRVVLIVADRGGGGGGRGSGISRGVAIRRGRGGHRDGDARCRLLPPELISLLSRAPTTETSSPPSAAMQQRRPASGRPSGTDGSDFSYRMVVDSRYQRVADGKSRLGRLILVQALHQVAGGALLLLALSKGAEMNKFAVMSVAAGLLAIVLGEIGRRRTMAVLLRMYTSLSSIAVAFSVACIIRSELFFKITKQNTESITSHELLEVVRVALGVLLQLVVIATTTRLLQNMSPPRRAS

SEQ ID NO: 12459 - protein, 311 aa, Magnaporthe grisea 70-15
MNSAASSHQPDASGEAPKQLNYLPYLKLNDGNQIPMLSYGLGTAQCRRGGDVDPKLVELTKIALKKGYNHLDGAEVYGNEEELGQAVKESGLPRESLFITTKTFCKPGVTTQESLDASLKRLQLDYVDLFLIHSPFWAESPEELQAKWAEMEALREAGKAKSIGVSNFLQEHLETILKTAKVPPAINQIEYHPYLQHGDLLDYHRKQNIATSAYGPLTAITNAKGGPVDGKYHELARKYGVTPGEIALRWCIDQGVVAITTSAKEDRLEALQKRIPSFKLTPKEVQEISELGNQKHHRGFWNNKFAADDRR

SEQ ID NO: 12460 - protein, 111 aa, Triticum aestivum
MSLCTIARRLCLSKPSSGRCLSVVWGHLYSTEVASQKVVDLADRIAALPPEEIKQIAPALLFRLNREPPQVISGQGFSFGAQGGSGAAAGKADEKKAEKTVFDVKLEKFDA

SEQ ID NO: 12461 - protein, 142 aa, Glycine max
  misc_feature (119)..(120): Xaa can be any naturally occurring amino acid
AVVNRYLAESESARQWGSQLHTFCIGLKGSPDLKAAKEVADYLGTRHHELYFTVQEGIDALEEVIYHIETYDVTTIRASTAMFLMSRKIKALGVKMVRGGEGSDEIFGGYLYFHKAHNXXEFHEETCRKIKAHHLYDCLRAQ

SEQ ID NO: 12462 - protein, 210 aa, Arabidopsis thaliana
MLTAAGDDELDPVVGPESATEAATPRVLTIISHVMEKLVARNEWLAKQTKGFGKSLEAFHGVRAPSISIAKYLERIYKYTKCSPACFVVGYVYIDRLAHKHPGSLVVSLNVHRLLVTCVMIAAKILDDVHYNNEFYARVGGVSNADLNKMELELLFLLDFRVTVSFRVFESYCFHLEKEMQLNDAVSSLKDIQPMQESLSPASTLSSLYV

SEQ ID NO: 12463 - protein, 170 aa, Campylobacter jejuni
MKNNPYIIWLTGLAGSGKTTIGQALYEKLKLKYKNLIYLDGDELREILGHYAYDKQGRIDMALKRAKFAKFLNDQGMIVIVTTISMFNEIYDYNRKQLKNYYEIYIECDMHELMQRDQKGLYTKALNKEIDNVVGVDIEFDKPEADLVIDNSCRNNLEEKVELIIKKLGL

SEQ ID NO: 12464 - protein, 356 aa, Glycine max
MVNNMIVQIHHGRLSENDSRRYFQQLIDGVDYCHSKGVYHRDLKPENLLLDSLGNIKISDFGLSAFPEQGVSILRTTCGTPNYVAPEVLSHKGYNGAVADVWSCGVILYVLLAGYLPFDELDLTTLYSKIERAEFSCPPWFPVGAKMLIHRILDPNPETRITIEQIRNDEWFQRSYVPVSLLEYEDVNLDDVNAAFDDAEEPRADQQCDNDDMGPLMLNAFDLIILSQGLNLATIFDRGQDSVKYQTRFISQKPAKVVLSSMEVVAQSMGFKTHIRNYKMRVEGVSANKTSYFSVILEIFEVAPTFYMVDIQKAAGDTGEYLKFYKNFCSNLEDIIWKPPHEASKSRISKTKSKRR

SEQ ID NO: 12465 - protein, 495 aa, Burkholderia fungorum LB400
MTGHLPKLSMYIGGEWVEPASGEYFETVDPFTAKPWALIPRGNAEDADRAIRAADKAFRDGPWRAMHPSERGLVLQRFGQLIGQHADELAGIEVRDNGRLLAEMRHQIRGIPKWYYYYGGLADKIEGAVHPVEQPALSFTRHEPLGVCVGIVPWNAPLLLLSLKAAPALAAGNTIVLKPAEFTSASALKLMELVEQAGFPPGVVNVVTGFGKEVGEPLVAHPLTRHLGFTGSTATGSHLYALAAKDVKRASLELGGKSANLVFNDADLNNAVRGVVGGIFGAVGQTCIAGSRLLVQRRIHDEFVDKLAAFTKTARIGDPRKPETQIGPIANRMQYNKILGYIDIAREEGAELVMGGARPDIAECGEGFFIEPTIYTGIRNDMRIAREEVFGPVLATIPFDDPEEAIAIANDSDFGLGAGVWTSDMRLALRMSERLEAGSVWINTYRDISYTTPFGGYKKSGIGRENGIEGIREYLQTKAVWISTAEEIENPFVIG

SEQ ID NO: 12466 - protein, 117 aa, Beta vulgaris subsp. vulgaris
MASSAFVKFTCALVMCMMVAAPLAEAITCGLVASKLAPCIGYLQGAPGPSAACCGGIKSLNSAAASPADRKTACTCLKSAATSIKGINYGKAASLPRQCGVSVPYAISPNTNCNAIH

SEQ ID NO: 12467 - protein, 243 aa, Triticum aestivum
MATDRVKASVLHGEKDLRLEERELPKPSSNEVQVAVQSTGLCGSDLHYYNHFRNGDIIVREPLTLGHESAGTVVAVGSEVTHLKPGDHVALEVGLPCETCELCDEGRYNICRGMKFRSSAKANPHAQGTLQERINHPAKWCHKMPEHVTLDLGALVEPLSVAMHARDRASLPKGSTVLVLGAGAVGLLAAAVAKADQAKTVIIADILKDRLDFATSNGFADASVVGPMEPQLSRTAGFRSKVA

SEQ ID NO: 12468 - protein, 386 aa, Triticum aestivum
  misc_feature (66)..(66): Xaa can be any naturally occurring amino acid
MEGGGARNVSAAAAQTKESADDGSCKPLPPCCVKAQAAVAESEAKCHATVVSGWFTGTRSRSGQTXSKAQYFNNPMWPGEAHSLKVEKILYQGKSPYQEVLVFESSTYGNVLVLDGIVQLTDKDECAYQEMVTHLALCSIPSPKNVLVVGGGDGGVLREIAKHDSVESIDICEIDQLVIDVCKDFFPRLYVGYKDPRVKLHVGDAVEFLRNSPEGKYDAIIVDSSDPIGPAQELVEKPFFQTIARALKPGGVLSNLAESMWLHTHLIQDMLSICREVFKGGVHYAWASVPTYPSGVIGFLLCAKEGPPVDFLTPVNPIEKIEGATKDGREMRFYNSEIHRAAFILPTFVKRELEAYNSSTEKERPEKPTAKPVKMKVMRDSAITAS

SEQ ID NO: 12469 - protein, 564 aa, Zea mays
MAAAAVTSNGGAVAANGPAPGRLASVYSEVQTNRLLHTLPLPSVLRSNFSVVDGPASSAAGNPDEIAKLFPNLFGQPSASLVPSAEPAATRPLKVGVVLSGGQAPGGHNVICGIFDYLQERAKGSTLLGFKGGPAGIMKCKYVELTSDFVYPYRNQGGFDMICSGRDKIETPEQFKQAEDTANKLDLDGLVVIGGDDSNTNACLLGEYFRSRNLKTRVIGCPKTIDGDLKCKEVPTSFGFDTACKIYSEMIGNVMTDARSTGKYYHFVRLMGRAASHITLECALQTHPNAALIGEEVAAKKETLKNVTNYITDIICKRADLGYNYGVILIPEGLIDFIPEVQKLIAELNEILAHDVVDEAGAWKSKLQAESRELFEFLPKTIQEQLMLERDPHGNVQVAKIETEKMLISMVETELEKRKAEGRYSAHFRGQAHFFGYEGRCGLPTNFDSNYCYALGYGAGALLQSGKTGLISSVGNLAAPVEEWTVGGTALTSLMDVERRHGKFKPVIKKAMVELDAAPFKKYASLRDEWAIKNRYISPGPIQFSGPGSDDSNHTLMLELGAEL

SEQ ID NO: 12470 - protein, 168 aa, Glycine max
  misc_feature (49)..(49): Xaa can be any naturally occurring amino acid
  misc_feature (145)..(145): Xaa can be any naturally occurring amino acid
MIYSPSVTTVNRAGADMGATFTDLNSMAGFPIIKTNNDITSIDTNNGRXQCIQVWPPIGNKKFETLSYLPYLDDAQLAKEVEYLLKKGWIPCLEFKSEHGFLCREHNKTPGYYYRRYCTMWKLPIEGCTDANNVVEEDKHDKTAXPNWLISIFRNDNEMQVHCISVNY

SEQ ID NO: 12471 - protein, 466 aa, Sinorhizobium fredii
MSKRFRSRSAARAARHRLRRGEQDMSNRLNTTPNDLSAFWMPFTANRQFKKEPRLFVGAKDMYYTTHDGRTVLDGTAGLWCVNAGHCRPKITEAIREQAGELDYAPAFQLGHPKAFELANRLVDIAPEGLNHVLYTNSGSESVDTALKVALAYHRAKGNGSRFRLIGRERGYHGVNFGGISVGGIVANRKMFGTLLTGVDHLPHTHLPAKNAFTRGEPKHGGDLASELERIVTLHDASTIAAVIVEPVAGSTGVLIPPKGYLQKLREICTKHGILLIFDEVITGYGRLGTPFAAQYFDVKPDIITTAKGLTNGVIPMGAVFVTSEIHDAFMTGPEHLIEFFHGYTYSGNPIASAAALGTLDTYKEEGLLTRAAELASYWEEALHSLKDCPHVIDIRNIGLIGAVELEPIAGEPTKRAFSAFLKAYEKGLLIRTTGDIIALSPPLIIEKHQIDELIDKLRDVLKNNI

SEQ ID NO: 12472 - protein, 195 aa, Zea mays
DVITGHGETMTCSKERNADLFDAVLGGLGQFGVITRARIVVEPAPARARWVRLVYTDFAAFAADQERLIAGPRQPDGTFGPMSYVEGSVFVNQSLATDLTNTGFFSDADVARIVALAAERNATTVYSIEATINYDNATSVDQELKSVLDTLSFVEGFAFQRDVSYEQFLDRVRNEEVALDKLGLWRVPHPWLNMF

SEQ ID NO: 12473 - protein, 502 aa, Arabidopsis thaliana
MAQVLSTPLAIPGPTPIQFMAGLLARIVTKNTNKETSTPESPRSPRTPQGSILMDKYEIGKLLGHGSFAKVYLARNIHSGEDVAIKVIDKEKIVKSGLAGHIKREISILRRVRHPYIVHLLEVMATKTKIYIVMEYVRGGELYNTVARGRLREGTARRYFQQLISSVAFCHSRGVYHRDLKLENLLLDDKGNVKVSDFGLSVVSEQLKQEGICQTFCGTPAYLAPEVLTRKGYEGAKADIWSCGVILFVLMAGYLPFDDKNILVMYTKIYKGQFKCPKWFSPELARLVTRMLDTNPDTRITIPEIMKHRWFKKGFKHVKFYIENDKLCREDDDNDDDDSSSLSSGRSSTASEGDAEFDIKRVDSMPRPASLNAFDILSFSDLSGLFEEGGQGARFVSAAPMTKIISKLEEIAKEVKFMVRKKDWSVRLEGCREGAKGPLTIRVEIFELTPSLVVVEVKKKGGNIEEYEEFCNKELRPQLEKLMHYQADEVEEVMCLPPEIEQ

SEQ ID NO: 12474 - protein, 312 aa, Methanothermobacter thermautotrophicus str. Delta H
MNKDALNALKFKYMKIRWSDMMNEGIINDILRVKNPRWRTSITRVEPNRIVTRGYSQEDLIGGVSFSEMVYLLIRGELPPQNVARMLEAVLVSFCDHGVTPPSTQAARMIASAGSPVHACIAGGLLAFGKNHAGAIERSMKLFQETVSSCESEDEIPDAALRLVDDHLQANRRIPGFGHRYHNADPRAVRLLELAEDYGCVGPHTSLALEVQEILLERKGVRMNVDGANAGILSDMGFDWRTGAGVFMIGRLPGLISHVYEEKVREPAFRKFFEIEEIQYDGEEKRILEADYRTLNGSEIWKTTNTKEPGRE

SEQ ID NO: 12475 - protein, 102 aa, Kluyveromyces lactis
GSRRASVGSMARPAFVNKLWSMVNDKSNEKFIHWSTSGESIVVPNRERFVQEVLPKYFKHSNFASFVRQLNMYGWHKVQDVKSGSMLSNNDSRWEFENERHA

SEQ ID NO: 12476 - protein, 467 aa, Listeria monocytogenes EGD-e
MTSVMWFRRDLRVNDNKALYHACKEDDLLLLFQVNPAQFITGSPSHQAFFASVAHFKQEVDKTALLQIMFGEPVECLKQLKETLPSWDKVYFNRDETGYGAERDEAAKTFFDEQEIEVQAFHDSYLHSAEEVKKSPTEYYKIFTPYYKKWREEIKETPFKVTLKADNIRKENLFPKYEEQFAEMTCDLPILDSGEKTANTRLANFIKHDVADYDKARDFPELDKTSHLSRYLRTGEISVRTIWQALQENEATEGRAIFEKELCWRDFYNMIYVSFPNQKNEPIQENYRFIEWENNREFFKAWQEGKTGFPLVDAAMRQLKETGWMHNRLRMVTASFLTKDLLIDWRFGEKYFQQMLIDYDPASNIGGWQWAASTGTDAVPYFRIFNPTTQSQKFDPTGKFIRKYVKELANLPDKFIHQPEKMSEIEQKEYGLLLGKDYPFPLIDHKERRKLAIARYEFSKEHYRGNI

SEQ ID NO: 12477 - protein, 107 aa, Triticum aestivum
MAGTAAIAPPPQPMAPPQPVEENATAAPSQPMAPLQPMAESATVVVVVPPPPPDGTTTFLCLILAFFIPPLGVFLKYKCEIEFWICLILTFLAYAPGIIYAVWVIVK

SEQ ID NO: 12478 - protein, 270 aa, Mycoplasma genitalium G-37
MDTYTSAKINWFPGHMKKIHDQLKKLSSQIDGIIEIVDARAPTLTHNSEIISYFLNKPKLILALKTDLAQYKPNKKILFGSLKEPFKLKKKVLKTLTTLFANKRQQLKAKGLLIKQFRLAVIGMPNVGKSSLINLLINKNHLKVANRAGITKSLNWIQISPELLLSDTPGVFLKRIDEIQIGYKLVLTNVIRREVVNIEEVGMFAFNYLKKHYKQLLPFEADSFINFLEKFAKVRGLIKKANELNTNLACEIFINELINGKYGKLSYELN

SEQ ID NO: 12479 - protein, 508 aa, Glycine max
  misc_feature (238)..(238): Xaa can be any naturally occurring amino acid
MASNDSDSQMKIVHGDAGYILEDVPHFADYIPNLPTYPNPLRSNPAYSVVKQYFVHMDDTVPQKVVVHKDSPRGVHFRRAGPRQKVYFKSDEVHACIVTCGGLCPGLNTVIREIVCGLSYMYGVNKVLGIDGGYRGFYSKNTITLTPKVVNDIHKRGGTILGTSRGGHDTGKIVDSIQDRGINQVYIIGGDGTQRGATVIYEEVRRRGLKVAIAGIPKTIDNDIPVIDKSFGFDTAVXEEAQRAINAAHVEAESIENGIGVVKLMGRYSGFIAMYATLASRDVDCCLIPESPFYLEGKGGLFEFIEKRLKENGHMVIVIAEGAGQDLLTESMQAMDQKDASGNKLLQDVGLWISHKIKDHFARKDKMPINLKYIDPTYMIRAIPSNASDNVYCTLLAQSAVHGAMAGYTGFTVGLVNGRQTYIPFIRINERQNKVVITDRMWARLLSSTNQPSFLSPKDLEEAKKAESPTQLLEENNCNDVGDAEKEQPPKDEQESGNHTDNGIKTQN

SEQ ID NO: 12480 - protein, 355 aa, Metarhizium anisopliae
MSRSNPPNAGGSRKISFNVSEQYDIQDVVGEGAYGVVCSAIHKPSGQKVAIKKITPFDHSMFCLRTLREMKLLRYFNHENIISILDIQKPRGYDTFNEVYLIQELMETDMHRVIRTQDLSDDHCQYFIYQTLRALKAMHSANVLHRDLKPSNLLLNANCDLKVCDFGLARSAASQEDNSGFMTEYVATRWYRAPEIMLTFKEYTKAIDVWSVGCILAEMLSGKPLFPGKDYHHQLTLILDVLGTPTMEDYYGIKSRRAREYIRSLPFKKKVPFRTLFPKTSDLALDLLEKLLAFNPVKRITVEEALKHPYLEPYHDPEDEPTAPPTPEEFFDFDKHKDTLSKEQLKQLIYQEIMR

SEQ ID NO: 12481 - protein, 154 aa, Glycine max
MSILPKGDSVQIREVWNDNLEEEFALIREIVDEYNYVAMDTEFPGVVLRPVGNFKNINDYNYQTLKDNVDMLKLIQLGLTFSDENGNLPTCGTESPCIWQFNFREFNVSEDIFASDSIELLRQCGIDFKKNSEDGIDVNRFRELLMCSGIVLND

SEQ ID NO: 12482 - protein, 453 aa, Corynebacterium glutamicum ATCC 13032
MSLTFPVINPSDGSTITELENHDSTQWMSALSDAVAAGPSWAAKTPRERSVVLTAIFEALTERAQELAEIIHLEAGKSVAEALGEVAYGAEYFRWFAEEAVRLPGRYGQSPSGIGHIAVTRAPVGPVLAITPWNFPIAMATRKIAPALAAGCPVLVKPASETPLTMVKVGEIIASVFDTFNIPQGLVSIITTTRDAELSAELMADPRLAKVTFTGSTNVGRILVRQSADRLLRTSMELGGNAAFVIDEAADLDEAVSGAIAAKLRNAGQVCIAANRFLVHESRAAEFTSKLATAMQNTPIGPVISARQRDRIAALVDEAITDGARLIIGGEVPDGSGFFYPATILADVPAQSRIVHEEIFGPVATIATFTDLAEGVAQANSTEFGLAAYGFSNNVKATQYMAEHLEAGMVGINRGAISDPAAPFGGIGQSGFGREGGTEGIEEYLSVRYLALP

SEQ ID NO: 12483 - protein, 144 aa, Triticum aestivum
  misc_feature (122)..(122): Xaa can be any naturally occurring amino acid
MAEEQQHQRWQEGHRLCANNCGFFGSPATLDLCSKCYRDLYQQQPAGAAAGPSAPTASAFQHSSSAVSGAAAVSPDLEPPATAPAGAKAGRCSSCRKRVGLTGFACRCGATFCGVQRYPERXACAFDFRAAGRDASRAQPVSRG

SEQ ID NO: 12484 - protein, 503 aa, Gossypium hirsutum
MAVQVPSRQLFIDGEWREPILKERLPTINPATEEIIGNIPAATAEDVELAVAAARRALSRNKGKDWATAPGAVRAKYLRAIAAKVTERKTELAKLEAIDCGKPLDEAVWDIEDVAGCFEYYADLAEGLDARQKAPVSLPMETFKSYVLKEPIGVVGLITPWNYPLLMATWKVAPSLAAGCAAILKPSELASITCLELAKVVKGSRLPPGVLNILAGLGPEAGAPLASHPDVDKIAFTGSSATGSKIMAAAAQMVKPVSLELGGKSPIIVFEDVDLDKAAEWTAFGCFWTNGQICSATSRLIVHENIAREFLDRLVKWTKNIKISDPFEEGCRLGPVVSGGQYEKVLKFISTAKSEGATILSGGVRPEHLKKGFFVEPTIITDVTTSMQIWREEVFGPVLCVKTFRTEEEALELANDTHYGLGAAVISNDLERCDRVSKNLQAGIVWVNCSQPCFCQAPWGGNKRSGFGRELGEWGLDNYLSVKQVTQYVSDEPWGWYRSPSKL

SEQ ID NO: 12485 - protein, 128 aa, Corynebacterium glutamicum ATCC 13032
MAKLTKDELIEAFKEMTLIELSEFVKEFEEVFDVTAAAPVAVAAAGAAGGEAAAAEEKDEFDVVLEDAGAKKIGVIKAVRELVSGLGLKEAKELVEGAPKAILEGANKDDAEAAKAKLEEAGAKVTLK

SEQ ID NO: 12486 - protein, 162 aa, Brassica napus
LASFLKQASEDAKKIVDEERAFARAEIESARAAVQRVEEALREHEQMSRASGKQDMEDLMKEVQEARRIKMLHQPSKVMDMEYELRALRNQLAEKSKHFLQLKKKLALCRKSEENVSLLYEIDGNEALGSCLRVRPCSDEAPESLKCTIQWYRSSSDDSKNE

SEQ ID NO: 12487 - protein, 333 aa, Triticum aestivum
MKTLLILTILAMAITISTANMQVDPSGQVQWPQQQLVPQPQQPLSQQPQQAFPQPQQTFPHQPQQQVPQPQQPQQPFLQPQQAFPQQPQQPFPQTQQPQQPFPQQPQQPFPQTQQPQQPFPQQPQQPFPQTQQPQQPFPQFQQPHQPFHQPQQQFPQPQQPQQSFPQQQRPFIQPYPQQRLNPCKNILLQQCKPASLVSSLWSIIWPQSDCQVMQQQCCQELAQIPQQLQCAAIHSVVHSIIVQQQQQQQQQQQQQQQQGMHILLPLSQQQQLGQGTLVQGQGIIQPQQLAQLEAIRSLVLQTLPTMCNVYVPPECSIIRAPFASIVAGIGGQ

SEQ ID NO: 12488 - protein, 373 aa, Aspergillus nidulans FGSC A4
MTIPLYDQLLSHQAVNEAFVLYPGGSFGYEKRDIPTLQAERDVLVRVVATGLCGSDVHYWQHGRIGRYVVEDPIVLGHESSGIVVQCGSQSGLTVGDRVVLEPGIACNTCHFCRAGRYNLCREMRFAATPPYNGTLATYYRVPAECCYKLPSHVSLRDGALIEPLSVAVHSCRLAGDMQEKSVVVFGAGPVGLLCAGVARAFGASTVVVVDVVMSRLQSAVKYGATHTHQATSESAEENAIAILGTAGLGLGADIVLDATGAEPCMNSGIHALAPGGTFVQVGLGRPNPSLPVGQICDKEIVFKGSFRYGPGDYKTAIGLVSSHRIRLEGLVTHEFSFSQAEEAFHNVASRAGVKSVIYGPGVDEHVARATLS

SEQ ID NO: 12489 - protein, 272 aa, Microbulbifer degradans 2-40
MNKARNKVKEIMPAVDVVIEVLDARLPASSTNPMIETLRGDKPYLKVLSKSDLADPTITKAWQAFFREQRNMDSLAITTDKVSIAKTIPDRIRKLLPNRGTSLKPIRALIMGIPNVGKSTLINTLAGKKIAPVGNEPAVTKAQQKIRISDNFFLIDTPGMTWPGSKNEMINYRLAASGAIRDTALEYDDLAVFAMDYMLQRYPEAIRKRYQFDELCESATAMLEELAMKRGCKKNGLPDLTRIGELFVRELRAGKLGRFSLEEPLVSYRKRE

SEQ ID NO: 12490 - protein, 267 aa, Pseudomonas putida KT2440
MSVPSFGLGTFRLTGQTVIDSVKSALAVGYRVIDTAQIYKNEAEVGQAIAESGVPRSELFITTKIWVDNYAADKLIPSLRDSLQKLRTDYVDLLLIHWPAPGNGVELPEYMKALADAKQQGLARQIGVSNFNIELTRQAIAVVGKGEIATNQIELSPYLQNSKLTAFLKEQGITVTSYMTLAYGKVLKDPVLAQIAAKHKATVAQVALAWALQLGYAVIPSSTKRENLASNLLARGLTLDTDDMARIAKLERNGREVSPDGLAPTWD

SEQ ID NO: 12491 - protein, 272 aa, Triticum aestivum
MGNHVMSERTTLDHCYSKQIHQKGRSNVITEDPLQVKNKMTNYLMSTETTLDHYNVKPSNQKGRKNVKFEDLPEDVLRTILSKLPVKEVLKTSALSSQWRYSWTICPKLSFNSVAVRGGIRLDEQKNEQQNFIDDVSLVLQKYQGKEVENFEVKYAFDSKLVDHLNCWVSFAVSSRMRNLALDLAPTKSGGRDDRYAFPFGLFDSESLARLQCIQLSFVLLKLPMQFRGFPNLRKLDLNLLHVTSNDLENMLSNCYSLEWLSIVRCHLNDEL

SEQ ID NO: 12492 - protein, 336 aa, Gossypium hirsutum
MESDTIECVSSIDEIVEDHEIPHHNLLHHPHPRHAPHHQFSSSKPHHNGTNNVNSISNIVGPTAIAPAASVHELLECPVCTNSMYPPIHQCHNGHTLCSTCKIRVHDRCPTCRQELGDIRCLALEKVAESLELPCKYYKLGCPETFPYYSKLKHEGICIYRPYNCPYAGSECSVVGDIPFLVAHLRDDHKVDMHTGCTFNHRYVKSNPREVENATWMLTVFHCFGQYFCLHFEAFQLGMAPVYMAFIRFVGDETEARNYSYSLEFGANGRKLIRKSAPRSIRDSHRKVRDSHDGLIIQRNMALFFSGGDRKELKLRVTGRIWKEQQNPDANMCIPN

SEQ ID NO: 12493 - protein, 411 aa, Neurospora crassa
MAGQPMESRFGRMSIHDENNDPSDGARLQQKARELKSKIAQRKNPPIISSEPPSPRKPQRTVPVATKSSTIVSSAAHKSTTYAGIRRVDDDDHDELSQPMASASVSSTGTSTSESSSSAGYEQSISPKQFHLGMFEIGRPLGKGKFGRVYLARERSSGFICALKVLYKSELQHGTGVEKQVRREIEIQSNLRHPNILKLYGHFHDSKRIFLILEYAGKGELYKHLRKENRFPEWKAAQYVAQMASALKYLHRKHVIHRDIKPENILVGIHGEIKISDFGWSVHAPNNRRQTLCGTLDYLPPEMIRSGSKDNWYNEKVDLWSLGVLTYEFLVGEAPFEDTPIMTQKRIARADMTIPEWVSKEAKDLIKKLLVLDPEKRLPLEEVENHPWILKHCVKGERAANREKMASKMGN

SEQ ID NO: 12494 - protein, 321 aa, Parasitella parasitica
MAVDYLTLDRTGDKMPLRGFGCWKIEKKDAENTIYQAIKIGYRLFDGACDYGNEVEVGRGINKAIKEGLVKREELFIVTKLWNTFHSKQHVRTAFDRQLKDWGLEYFDLYLIHFPIPLQYVDPAVSYPPEWYVPHADKLNFERSPIHECWAEMEKLVQAKLTRNIGVANFNCQAILDLLSYSKIKPAVLQIEIHPLLPQERLVKWVQEQGIQVTAYSSFGPTSYVDLCESGKTYSSLLANADVKSIANKHNVNTGQILLRYALDRNIAVIPKSVHEDRMKSNLDILNIQLDQDDRKILNSLKTNQRFNDPMIFGFGLPLFD

SEQ ID NO: 12495 - protein, 474 aa, Bacillus thuringiensis serovar konkukian str. 97-27
MKKHLYINGDWKSVNTYKPLYAPYSEETLAEIAQGTEEDVKEAVAAAKNAMKEMNTLSAYDRATILEKVAQKMDERREEFAEIIAKEAAKPIRAARGEVDRTVQTYKFAAEEAKRIYGETLPLDAAPGADGRIAYTIRKPIGVIGAITPFNFPLNLVAHKVGPAIAAGNTVVLKPADQTPLSSYALIELFEEAGLPKGALNIISGPGSTVGEAIVTNDDVASITFTGSPKVGIGIKAKAGLKRVTLELGSNAAVIIDEDVELTDELIERVKWGAFVNNGQVCISVQRVFVHEERMDDFLSKLRKAMETVVVGDPLIEETDVSALISKKDVERIDNWVQEAVKEGANVLYGGNKRDERVFEPTVLTNVPEHVSVQCQEVFGPLMTVNTFKEFDEAIEQVNNSRYGLQAGVFTNNLFKAMRAIDELEVGGVMINDIPTFRVDHMPYGGVKESGTGREGIKYAIEEMTEMKLVCIKK

SEQ ID NO: 12496 - protein, 171 aa, Spinacia oleracea
MASDSSAQPKSVHEFVVRDARGNDVDLSIYKGKVLLIVNVASQCGLTNSNYTEMTELYEKYRELGLEILAFPCNQFGNQEPGSNEEVLEFACTRFKAEYPIFDKVDVNGSNAAPIYKFLKSSKGGLFGDGLKWNFTKFLVDKDGNVVDRYAPTTSPKSIEKDVKKLLGIQK

SEQ ID NO: 12497 - protein, 71 aa, Glycine max
  misc_feature (50)..(50): Xaa can be any naturally occurring amino acid
LCGAAVTTVNRAGACMVSPFTGGKSMAGFPTMNTNTDITFIVSNWGRVAXMQAWPPVGQKMFETLAYLPDL

SEQ ID NO: 12498 - protein, 250 aa, Capsicum annuum
MGKCYPTVSEEYLKAVDKCKRKLRGLIAEKNCAPLMLRLAWHSAGTYDVCSKTGGPFGTMRFKTEQSHGANNGIDIALRLLEPLGEQFPILSYADFYQLAGVVAVEVTGGPDVPFHPGREDKPEPPVEGRLPDATKGSDHLRDVFVKQMGLSDQDIVALSGGHTLGRCHKERSGFEGPWTANPLIFDNSYFKELLGGEKEGLLQLPSDKALLSDPAFRPLVEKYAADEDAFFADYAEAHLKLSELGFAEA

SEQ ID NO: 12499 - protein, 237 aa, Glycine max
  misc_feature (186)..(186): Xaa can be any naturally occurring amino acid
MTSASELFHSRRHRLGRSALDLGLDTELNAADSLRRHYHLRRLRHHPERASDRIDGRYRRSFASESVDSEENVRSSLRGSDSERLPVGVVLARARLLQRLRGEPLSTNRQYDRDSFGEDRESELSNEDPTRASLVSDLTSQMARSQFLQELNTKPPGLTQEALDCLHQEVFSSSGNEIGLESRVLXQDCSICLESFTDGDELIRLPCGHKFHSVCLDPWIRCCGDCPYCRRSIVVIN

SEQ ID NO: 12500 - protein, 335 aa, Saccharomyces cerevisiae
MSEPAQKKQKVANNSLEQLKASGTVVVADTGDFGSIAKFQPQDSTTNPSLILAAAKQPTYAKLIDVAVEYGKKHGKTTEEQVENAVDRLLVEFGKEILKIVPGRVSTEVDARLSFDTQATIEKARHIIKLFEQEGVSKERVLIKIASTWEGIQAAKELEEKDGIHCNLTLLFSFVQAVACAEAQVTLISPFVGRILDWYKSSTGKDYKGEADPGVISVKKIYNYYKKYGYKTIVMGASFRSTDEIKNLAGVDYLTISPALLDKLMNSTEPFPRVLDPVSAKKEAGDKISYISDESKFRFDLNEDAMATEKLSEGIRKFSADIVTLFDLIEKKVTA

SEQ ID NO: 12501 - protein, 340 aa, Xanthomonas campestris pv. campestris str. ATCC 33913
MKALVKREASKGIWLEQVPVPTPGPNEVLIKLEKTAICGTDLHIYLWDEWSQRTITPGLTIGHEFVGRVAELGSAVTGYQVGQRVSAEGHIVCGHCRNCRGGRPHLCPNTVGIGVNVNGAFAEYMVMPASNLWPIPDQIPSELAAFFDPYGNAAHCALEFDVIGEDVLITGAGPIGIIAAGICKHIGARNVVVTDVNDFRLKLAADLGATRVVNVSKTSLKDVMADLHMEGFDVGLEMSGNPRAFNDMLDCMYHGGKIAMLGIMPRGAGCDWDKIIFKGLTVQGIYGRKMYETWYKMTQLVLSGFPLQKVLTHQLSIDEFQKGFDLMEEGKAGKVVLSWN

SEQ ID NO: 12502 - protein, 94 aa, Brassica napus
MAGVGRNMVAPLLVLNLIMYLIVIGFASWNLNHFINGLTNRPGVGGNGATFYFLVFAILAGVVGAASKLAGVHHVRTWRGDSLATSASSSLVAW

SEQ ID NO: 12503 - protein, 504 aa, Arabidopsis thaliana
MLIVRSFTILLLSCIAFKLACCFSSSISSLKALPLVGHLEFEHVHHASKDFGNRYQLIPLAVLHPKSVSDIASTIRHIWMMGTHSQLTVAARGRGHSLQGQAQTRHGIVIHMESLHPQKLQVYSVDSPAPYVDVSGGELWINILHETLKYGLAPKSWTDYLHLTVGGTLSNAGISGQAFRHGPQISNVHQLEIVTGKGEILNCTKRQNSDLFNGVLGGLGQFGIITRARIALEPAPTMDQEQLISAQGHKFDYIEGFVIINRTGLLNSWRLSFTAEEPLEASQFKFDGRTLYCLELAKYLKQDNKDVINQEVKETLSELSYVTSTLFTTEVAYEAFLDRVHVSEVKLRSKGQWEVPHPWLNLLVPRSKINEFARGVFGNILTDTSNGPVIVYPVNKSKWDNQTSAVTPEEEVFYLVAILTSASPGSAGKDGVEEILRRNRRILEFSEEAGIGLKQYLPHYTTREEWRSHFGDKWGEFVRRKSRYDPLAILAPGHRIFQKAVSYS

SEQ ID NO: 12504 - protein, 479 aa, Mesorhizobium sp. BNC1
MNDLNLTTLEGGQTTISVPIIEALSSQLRGIALTPADAGYEEPRTIWNAMIDRRPGLIIRCAGAADVVSAVRFARENNLLVAVRGGGHNIAGNAVCDGGLLIDLSPMKSVRVDAALRRAWVEPGATLADVDKETQAFGLVVPSGINSTTGIAGLTLGGGFGWLTRKFGLTLDNLLSADVVTANGELLRTSLSENPDLFWAIRGGGGNFGVVTAFEFQLHDFGPQVLSGLVVHPFDNAASVLQQYREALDDAPDELTCWAVMRQAPPLPFLPAEWHGKEILALAMCYCGDIAEGEKATARLRSIGRPIADVVAPTPFTAWQQAFDPLLTPGARNYWKSHDFGGLSDETIDVVLEAIRRLPGPECEVFIGHVGGAAGRIATEATSFPQRSSHYVMNVHARWREPEMDQACIDWARGLFEAAKPYAIGTAYINFMPADETDRVAAAYGPNYQRLAELKARYDPTNLFRLNQNVRPTAELRAA

SEQ ID NO: 12505 - protein, 421 aa, Arabidopsis thaliana
MEKKGSVLMLRYEVGKFLGQGTFAKVYHARHLKTGDSVAIKVIDKERILKVGMTEQIKREISAMRLLRHPNIVELHEVMATKSKIYFVMEHVKGGELFNKVSTGKLREDVARKYFQQLVRAVDFCHSRGVCHRDLKPENLLLDEHGNLKISDFGLSALSDSRRQDGLLHTTCGTPAYVAPEVISRNGYDGFKADVWSCGVILFVLLAGYLPFRDSNLMELYKKIGKAEVKFPNWLAPGAKRLLKRILDPNPNTRVSTEKIMKSSWFRKGLQEEVKESVEEETEVDAEAEGNASAEKEKKRCINLNAFEIISLSTGFDLSGLFEKGEEKEEMRFTSNREASEITEKLVEIGKDLKMKVRKKEHEWRVKMSAEATVVEAEVFEIAPSYHMVVLKKSGGDTAEYKRVMKESIRPALIDFVLAWH

SEQ ID NO: 12506 - protein, 159 aa, Saccharomyces cerevisiae
MSEITLGKYLFERLKQVNVNTIFGLPGDFNLSLLDKIYEVDGLRWAGNANELNAAYAADGYARIKGLSVLVTTFGVGELSALNGIAGSYAEHVGVLHVVGVPSISAQAKQLLLHHTLGNGDFTVFHRMSANISETTSMITDIATAPSEIDRLIRTTFIT

SEQ ID NO: 12507 - protein, 280 aa, Aquifex aeolicus VF5
MRDIVFIERDPYAPIRHCYTVSKILYQGKSPYQEIQVIESPEFGRMLILDGVVQLDEKYEFLYHEYLAHVPLHAHPNPRNVLIIGGGDGGTLREVLKHDIVERAVLVDIDKEVIEVSKKYLPTLSVGFQDPRAIVVNEDGYKYVQDYENEFDVIIVDSTDPVGFAHVLTTEDFFRHVYKALKEDGIFVAQTESIHYHLEMVSNIQQRLKKVFPIVDLYTSVIPIYAGYWWTFSIASKKYPVRTPAREVKVQTKIYDADMHEYAFLPESFYNKIVNGEYKY

SEQ ID NO: 12508 - protein, 302 aa, Escherichia coli
MIKKIGVLTSGGDAPGMNAAIRGVVRSALTEGLEVMGIYDGYLGLYEDRMVQLDRYSVSDMINRGGTFLGSARFPEFRDENIRAVAIENLKKRGIDALVVIGGDGSYMGAMRLTEMGFPCIGLPGTIDNDIKGTDYTIGFFTALSTVVEAIDRLRDTSSSHQRISVVEVMGRYCGDLTLAAAIAGGCEFVVVPEVEFSREDLVNEIKAGIAKGKKHAIVAITEHMCDVDELAHFIEKETGRETRATVLGHIQRGGSPVPYDRILASRMGAYAIDLLLAGYGGRCVGIQNEQLVHHDIIDAIE

SEQ ID NO: 12509 - protein, 161 aa, Triticum aestivum
MDPMDIVGKSKEDVSLPKSTMTKIIKEMLPPDVRVARDTQDLLVECCVEFINLLSSESNDVCSRDDKKTIAPEHVIRALQDLGFKEYVEEVYAAYEQHKLETLDSPKATKFTGIEMTEEEAVAEQQRMFAEARARMNNGAAKPKEPALEPQNQPQQPPQPQ

SEQ ID NO: 12510 - protein, 170 aa, Arabidopsis thaliana
MSSNKIVLTSSDDESFEVEEAVARKLKVIAHMIDDDCADKAIPLENVTGNILALVIEYCKKHVLDDVDDSDDSTEATSENVNEEAKNELRTWDAEFMKEFDMETVMKLILAVNYLNVQDLLGLTCQTVADHMKDMSPEEVRELFNIENDYTPEEEDAIRKENAWAFEDLK

SEQ ID NO: 12511 - protein, 305 aa, Escherichia coli
MIKKIGVLTSGGDAPGMNAAIRGVVRSALTEGLEVMGIYDGYLGLYEDRMVQLDRYSVSDMINRGGTFLGSARFPEFRDENIRAVAIENLKKRGIDALVVIGGDGSYMGAMRLTEMGFPCIGLPGTIDNDIKGTDYTIGFFTALSTVVEAIDRLRDTSSSHQRISVVEVMGRYCGDLTLAAAIAGGCEFVVVPEVEFSREDLVNEIKAGIAKGKKHAIVAITEHMCDVDELAHFIEKETGRETRATVLGHIQRGGSPVPYDRILASRMGAYAIDLLLAGYGGRCVGIQNEQLVHHDIIDAIENMK

SEQ ID NO: 12512 - protein, 432 aa, Actinobacillus pleuropneumoniae serovar 1 str. 4074
MRTTELIELDQKHIWHPYSSITHPIPTYPVERADGVIITLKDGKKLIDGMSSWWAALHGYNHPRLNQAATEQLSKMSHIMFGGLTHEPAAKLSQKLLEILPPELNKIFFADSGSVAVEVAMKMALQYAQASGQKNAKKRTKFATIRSGYHGDTWHAMSVCDPVTGMHGLFNSSLPVQYFLPQPSVKFGEAWRDEAILPLQDLFEQHGDEIAALILEPVVQGAGGMYFYSPVYLQKARELCDRFGILLIFDEIATGFGRTGKLFALQHAEVVPDIICLGKALTGGYLTLSATVTTEKVATVICEGEAKCFMHGPTFMANPLACAIAYESINLLLESDWQANIQRIERQLLEELAPAKHFKSVAEVRVLGAIGVLEMQQPVDLVPLQKLFVEHGIWVRPFGKLVYIMPPFIISQAELTQLTSALLQVLKIAYNE

SEQ ID NO: 12513 - protein, 143 aa, Gossypium hirsutum
GCERTTEGYGCEEDDRRELKHESQCSYRPYSCPYAGSECTVIGDFPYLVAHLKDDHKVDMHNGSTFNHRYVKSNPHEVENATWMLTVFSCFGQYFCLHFEAFQLGISPVYIAFLRFMGDDNEAKNYSYSLEVGGNGRKMIWQG

SEQ ID NO: 12514 - protein, 400 aa, Arabidopsis thaliana
MTKKMRRVGKYEVGRTIGEGTFAKVKFARNTDTGDNVAIKIMAKSTILKNRMVDQIKREISIMKIVRHPNIVRLYEVCLFVSMHLRNFISEVLASPSKIYIVLEFVTGGELFDRIVRNFHTCRQRPLVHKGRLEESESRKYFQQLVDAVAHCHCKGVYHRDLKPENLLLDTNGNLKVSDFGLSALPQEGVELLRTTCGTPNYVAPEVLSGQGYDGSAADIWSCGVILFVILAGYLPFSETDLPGLYRKINAAEFSCPPWFSAEVKFLIHRILDPNPKTRIQIQGIKKDPWFRLNYVPIRAREEEEVNLDDIRAVFDGIEGSYVAENVERNDEGPLMMNAFEMITLSQGLNLSALFDRRQDFVKRQTRFVSRREPSEIIANIEAVANSMGFKSHTRNFKVT

SEQ ID NO: 12515 - protein, 181 aa, Lactuca sativa
MASISSSAVATVNRSTPAQASLAAPFTGLKSNVAFPVTKKANNDFSSLPSNGGRVQCMKVWPPIGLKKYETLSYLPPLSDEALSKEIDYLIRNKWVPCLEFELEHGFVYREHHHSPGYYDGRYWTMWKLPMFGCTDSAQVMKEVGECKKEYPNAFIRVIGFDSVRQVQCISFIVSKPPGVL

SEQ ID NO: 12516 - protein, 175 aa, Glycine max
  misc_feature (112)..(112): Xaa can be any naturally occurring amino acid
  misc_feature (122)..(122): Xaa can be any naturally occurring amino acid
  misc_feature (125)..(126): Xaa can be any naturally occurring amino acid
MASSMISSPAVTTVNRAGAGMVAPFTGLKSMAGFPTRKTNNDITSIASNGGRVQCMQVWPPVGKKKFETLSYLPDLDDAQLAKEVEYLLKKGWIPCLKFELKHSFVYQEHNXSPKYYDRHYXTIXXLAMFRYTNTSQVWKELQETKTTYANNFMHIIKFYNIRQIHYINFIGYEP

SEQ ID NO: 12517 - protein, 475 aa, Rickettsia montanensis
MNLLKNITGKNYINGEFIEFGKQISVINPATLKEIATVPNLGLSEINSAINNTVTSFSSWSQSSFEARIAILRRWYNLVIENIEELSHILTLEQGKVLAESKKEILYGVSFIDWYTYAIHNIHSTIKPGNSKAHKIVTQYEPVGPSAAITPWNFPNAMITRKVVPAIAAGCSVILKPSSLTPLSALVLAKFASDAGLPAGVFNVITGSSDIIGKAFCEDFRLRKLSFTGSTNVGKILYQNAANTLKRLSLELGGNAPFIITADNNLEKVVSDLITAKTRNSGQSCISPNRIFIEESIYEKFIEILKAKFTKLKAGDGFDKESDVGPLINSAAIEKIQKLLADAQSKGAKLICGGKAVDNFIEPTIIIDCLDNMDIFRTEIFGPVVACYKFKDLDEVIERANNTEYGLQGYVYSNNISVVQMIASKLDFGMVSINDPLPANAKAPFAGRKASGFGVEGSFEGIFEYLNTKYINLQH

SEQ ID NO: 12518 - protein, 317 aa, Streptomyces avermitilis MA-4680
MARDYYEVLGVSRSASQDEIQQAYRKLARRHHPDVNKDPGAEERFKDLNEAYSVLSDPKTRARYDRFGEDFRKIPEDFDERVAAGAGGGFRGRRTAGGGGPRVRYAPGFGDDFGAEGIDIEDLFGSMFGAGAARGGVPGADQEAELPLTVEEAYRGGRRTVTLAGPDGQPRRYEVDVPPGVTDGQRIRLAGEGGRGSGDAAAGDLYLRVRIQPHPRFRLDGRDVHVQVPVAPWEAALGATVPVPTPGGGTAKVTVPAGSSSGRRLRLRGEGMPNPRGANGDLYAELRIVVPPTLGDQERELFEELAATSSFDPRRTR

SEQ ID NO: 12519 - protein, 475 aa, Rickettsia rickettsii
MNLLKNITGKNYINGEFIEFGKQISVINPATLKEIATVPNLGLSEINSAINNTVTSFALWSQSSFEARIAILRRWYNLVIENIEELSHILTLEQGKVLAESKKEILYGASFIDWYTYAIHNIHSTIKPGNSNTHKIVTQFEPVGPSAAITPWNFPNAMIARKVVPAIAAGCSVILKPSSLTPLSALVLAKFASDAGLPSGVFNVITGSSDIIGKAFCEDFRLRKLSFTGATNVGKILYQNAANTLKRLSLELGGNAPFIITADNNLEKVVSDLVIAKTRNSGQSCTSPNRIFIEESIYEKFIEILKAKFTKLKAGDGFDKESDVGPLINSAAIEKIQKLLADAQSKGAKLICGGKTVDNFIEPTIIIDCLDNMDIFRIEIFGPVVACYKFKDLDEVIEHANNTEYGLQGYVYSNNISVAQMIASKLDFGMVSINDPLPANAKAPFAGRKASGFGVEGSFEGIFEYLNTKYINLQN

SEQ ID NO: 12520 - protein, 265 aa, Arabidopsis thaliana
MEFERYLGEGSFGSVSLFSYKRRCDVETLYAAVKTSDDAKSLYEEFQILSKFKGCSRIVQCYGSGVEQRLNDKGYVEYTIPMEYAAGGSLSDFMDRFNDKKLPDPMIRKFTRMLLEGLATIHRHGYVHCDLKPENILVFPGSVCDLKLKISDFGLSKRDGDTTWWHPLKSYAGTPIYMSPESISHGEIGKGLDLWSLGCVVLEMYTGKRPWWHTNYELEDLMKCYEPLFPPNLPCDAKLFLMTCFAPEPDERKDALTLLRQSFFR

SEQ ID NO: 12521 - protein, 234 aa, Arabidopsis thaliana
MGRGKIVIRRIDNSTSRQVTFSKRRSGLLKKAKELSILCDAEVGVIIFSSTGKLYDYASNSSMKTIIERYNRVKEEQHQLLNHASEIKFWQREVASLQQQLQYLQECHRKLVGEELSGMNANDLQNLEDQLVTSLKGVRLKKDQLMTNEIRELNRKGQIIQKENHELQNIVDIMRKENIKLQKKVHGRTNAIEGNSSVDPISNGTTTYAPPQLQLIQLQPAPREKSIRLGLQLS

SEQ ID NO: 12522 - protein, 381 aa, Ustilago maydis 521
MSTTGGAAETGANGSVASAQAAVFVQSQPLPADTPQVVGPDFEHQDPNDLLRLLESMSKVGFQASSVSKAIEIVQEMRQWRLSNDAAYLASEDADKPSLSDAQNTQCRIFLGFTSNLVSSGLREVIKFLVKNKMVSALVTTAGGIEEDLIKCLGPTYLGDFALDGATLRKQGLNRIGNLLVPNDNYCKFEDWVMPILDAMRAEQGDNVSHAWSPSRVIERLGKEINDESSILYWAAKNQIPVFCPALTDGSLGDMIYFHSYKNPGLTIDLVKDIRRLNDLSVKAPKAGMIILGGGVCKHQIANAMLFRNGADFSVYINTGQEFDGSDSGARPDEAVSWGKIKSAANGGKSVKVYCDATIIFPMIVAATFAKAYWAERELAN

SEQ ID NO: 12523 - protein, 129 aa, Guillardia theta
MNKVQNIIDQLKDLTLLEAADLVKQIEETFNVSATAAAAPINMVAATAGAGSAEAVEEKTEFDLILEDVPADKKIAVLKVVRGLTGLGLKEAKDLVEAAPKPIKEGMSKADAEAGKKQLEEAGAKATLK

SEQ ID NO: 12524 - protein, 327 aa, Arabidopsis thaliana
MNEVAIKRINRSICNGGVGFGVRKVFGKGSFGSVRLFSYKRRCDGETLYATVKTSDDAKSLYEEFQILSKFKGCPRIVQCYGNGVKQRFNDKGYVEYMIPMEYATGGSLNNFMDRFNDRKLPDPMIRKFTRMLLEGLATIHRYGYVHYDIKPENILVFPGSVYKEGAWRYSYKLKISDFGLSKRDGDTKWWHPLKSYAGTRIYMSPESISHGEIGKGLDLWSLGCVVLEMYTGKRPWWHTNYELEDLMKCYEPLFPPNLPCDAKLFLMTCFAPEPDERKDALTLLRQSFFRRDVNKLTKLLKVDNRNDFTLELKKLRQMLSEIRSMR

SEQ ID NO: 12525 - protein, 175 aa, Triticum aestivum
  misc_feature (24)..(24): Xaa can be any naturally occurring amino acid
MAPAVMASSATTVAPFQGLKSTAXGLPVGRRSSGSLGSVSNGGRIRCMQVWPIEGIKKFETLSYLPPLSTEALLKQVDYLIRSKWVPCLEFSKVGFVFREHNSSPGYYDGRYWTMWKLPMFGCTDATQVLNEVEEVKKEYPDAYVRVIGFDNLRQVQCVSFIAFRPPGCEESGKA

SEQ ID NO: 12526 - protein, 483 aa, Cupriavidus necator
MELQHTALLRTHCLIDGEWTGAQSGAELAVCNPATGERIGSVPLAGAAEAEQAVRAAERALPAWRAQTGKAVPPVLRRWADLMLAHQEDLARLMTAEQGKPLPDARGEVAYAASFLEWFGEEAKRVDGEVLASPRSSQKMLVLREPVGVCAAITPWNFPAAMITRKVGPALAAGCTIIVKPAEQTPLTALALAVLGEQAGVPRGVLQVVTGDAVQIGGVLCASPVVRKLSFTGSTAIGKLLMAQCAGTVKKLSLELGGNAPLIIFDDADMDSAVEGIIASKFRNTRQTCVCANRIYVHDRVYDEVARRLVSAVEQLLPGHGVDSGVTQGPLIDADAVAKVEAHIADALAQGATVLTGGQRHALGGTFFAPTVLANATASMRVAREETFGPLAPLFRFTSEAEVVAMANDTESGLAAYFFSRDMAKIWRVAQGLEYGMVGINTGLISNEVAPFGGVKQSGLGREGSRHGIDEYLETKYLCMEVE

SEQ ID NO: 12527 - protein, 454 aa, Bradyrhizobium japonicum USDA 110
MPLLSRQQRSAAVTLHQIPNTIKTDSFWMPFTANRQFKKAPRLFSSAEGMHYTTVDGRKVIDGSAGLWCVNAGHGRKQIAAAVERQLMTLDFAPTFQMGHPLAFDFAERLAEIAPKGLDRIFFTNSGSESVDTALKIALAYHRATGQSSRTRLIGRERGYHGVGFGGTSVGGMVANRRAFATLLPGVDHIRHTHDLSRNAFAKDQPEHGAELADDLERLVGLHGAETIAAVIVEPVPGSTAVLPPPKGYLQRLREICDKHGILLIFDEVITGFGRLGTPFAANFFGVTPDLMTTAKGITNGTIPCGAVFASRKVHDGMMVGPENQMELFHGYTYSAHPTACAAGIATLDIYKDEGLLTRGASIAEYWRDALHSLKGLPNVVDIRNCGLMGAVELAPRAGVVGARGYDVMVDCFNTGLYLRMSGDSFAMSPPLIVEKSHIDQMVSILGDAIKKVA

SEQ ID NO: 12528 - protein, 177 aa, Triticum aestivum
  misc_feature (119)..(119): Xaa can be any naturally occurring amino acid
  misc_feature (129)..(129): Xaa can be any naturally occurring amino acid
  misc_feature (145)..(145): Xaa can be any naturally occurring amino acid
  misc_feature (151)..(151): Xaa can be any naturally occurring amino acid
  misc_feature (155)..(156): Xaa can be any naturally occurring amino acid
MAPTVMASSATSVAPFQGLKSTAGLPVSRRSNGASLGSVSNGGRIRCMQVWPIEGIKKFETLSYLPPLSTEALLKQVDYLIRSKWVPCLEFSKVGFIFREHNASPGYYDGRYWTMWNCXYFGCTDATQXDQRVEEVKKEYPDAYXRIIGFXTCAXXCVSSCLQHGLKIGRLTVTTAI

SEQ ID NO: 12529 - protein, 77 aa, Glycine max
MGLWTLLEGFLLLANALAILNEDRFLTPRGWGLSDFSAGQTKSFKGQLIGLIYATQYLRFPLILLNSVFIIVKLVSG

SEQ ID NO: 12530 - protein, 347 aa, Gibberella zeae PH-1
MTDDTHRKIWQPLHPTIRDRLDPQYVAYHEAHLQYIEPDEIKDWDGSTRTKKVSLPPGGTKPVPVGSIDDYHVGRFKVRVYTPTGQCDERGWPVLVWLHGGGWAVGGLNNGTDLCCWACEKARCLVVSVDYGLAPENPFPVAVEDSIDAVRWVASCPAQLQKIDTSRISVSGTSSGANLAIVAALSASNPEAALPTARPSLSNTIAHPPVSLLLFIPVVDNTATVDGVWKPNAEVAPWLTPSRMEWYRKLYFTQDEHRSRWDASPNLAPDTLLKKLPKTWIAIAEMDILATEASTFSQQLKGLGVNVETLLVEGGTHSILSLHGVIDRGYKMIEDAIKHLQETFGTG

SEQ ID NO: 12531 - protein, 350 aa, Glycine max
  misc_feature (103)..(103): Xaa can be any naturally occurring amino acid
  misc_feature (195)..(195): Xaa can be any naturally occurring amino acid
MFTCIACTKTDDKDEEGGSRESGTPSTKEAVKSLTTQIKDMALKFSGAYKQCKPCTGSSSYKKGHRPYPDFDTISEGVPYPYIGGASSSSTPAWDFTTSHYPXGRSDPRFAGAYGGDRTPRGRDSSSVCDVVLEDEDEPKEWMAQVEPGVHITFVSLPNGGNDLKRIRFSREMFNKWQAQRWWGENYDRIMELYXNVQRFNKQALNTPPRSEDEQRDSSYSRLTSARESPMASNKDWTPRSHYKFSGSRGYYPSEPLDHGGGSGQYHAGPSMEPARDTTASRDEPSISNASEMETEWVEQDEPGVYITIRQLADGTRELRRVRFSRERFGEVNAKTWWEENRERIQAQYL

SEQ ID NO: 12532 - protein, 568 aa, Zea mays
APRGVEPRLFVARAAGPAQQAADAKACSALCSPAARAVPAMESFGVPPAPVAAPEKRKKPLDLKDPVPAAAAAAANGGGATKASPAAKWAEKKKLVGGDAGYVLEDVPHLTDYLPQLPTYPNPLQDNPAYSVVKQYFVNPDDTVTQKIVVHKTSARGTHFRRAGPRQRVYFQPDEVNAAIVTCGGLCPGLNTVIRELVCGLYDMYGVTSVVGIEGGYKGFYSKNTVALTPRSVNGIHKRGGTVLGTSRGGHDTAKIVDCLQDRGINQVYIIGGDGTQKGASVIYEEVRRRGLKCAVVGVPKTIDNDIAVIDKSFGFDTAVEEAQRAINAAHVEAESAENGIGVVKLMGRNSGFIAMYATLASRDVDCCLIPESPFYLEGKGGLLEFVERRLKDNGHMVIVVAEGAGQDLIAKSMNSVDTQDASGNKLLLDVGLWLSQKIKDHFKKKPRFPITLKYIDPTYMIRAVSSNASDNVYCTLLAHSALHGAMAGYTGFIVAPVNGRHAYIPFYRITEKQNKVVITDRMWARVLCSTNQPCFLSHEDVENMKHDDDEHHLHNTLLLDSPENSSK

SEQ ID NO: 12533 - protein, 126 aa, Zea mays
FQAQDPVEASHFQSDGRVLYCLELTKNFNSDDTDTMEQEVTVLLSRLRFIQSTLFHTDVTYLEFLDRVHTSELKLRAQGLWEVPHPWLNLLIPRSSIRRFAKEVFGKILKDSNNGPILLYPVNKSK

SEQ ID NO: 12534 - protein, 491 aa, Ralstonia eutropha JMP134
MKTQEVLPICIAGEWRLGTGDRYATRYPATGEVVAELNAASLADVEEAVQGAQRAFETSGWARRKPHERAAVLYRVAELIRAQAEPLAQRQRLDNGKPISETRALVASAASTFQFFAAACETLEEQITPQRGECLTMSVYEPMGVVAAITPWNSPIASEAQKMAPALAAGNAVVVKPAEVTPLMALELARICDEAGVPKGLISVLPGKGSVIGDAITKHPLVRRVSFTGGTTTGKHIAHIAADKMMPVSLELGGKSPTMVFDDADLDHAVNGVLYGIFSSSGESCIAGSRLFVARSQYEPFIERLAAGAAHLRVGDPADERTQMGPLITDRHRDSIESYVAMGVQDGGQLRTGGLRPDVAGLPNGYFYTPTIIEGLDNHARIAQEEIFGPVLVAIPFDDEDDLIEQANDSVYALAAGIWTRDYKRAWRVARAVQAGNVWINTYKQFSISAPFGGWRDSGLGREKGRLGILQYMEQKSVYWGLNEQPLPWAN

SEQ ID NO: 12535 - protein, 221 aa, Azoarcus sp. EbN1
MENRIGTMTRSEASVLSTNRVIRNTYMLLSLTLAFSALTAGASLALGLPHPGIILTLVGYFGLLFLTTKFRDSGLGILFVFALTGFMGYTLGPIVSHYLAMPNGGQVVMQAMGGTAAIFLGLSAYALTSRKDFSFMGGFLVVGILVAFLAGLGAIFFEMPGLSLAVSAMFVLLMSGLILYETSNIIHGGETNYVMATVTLYVSIYNLFTSLLHILGVMNND

SEQ ID NO: 12536 - protein, 91 aa, Glycine max
  misc_feature (45)..(45): Xaa can be any naturally occurring amino acid
  misc_feature (51)..(51): Xaa can be any naturally occurring amino acid
  misc_feature (80)..(80): Xaa can be any naturally occurring amino acid
MSRKIESLGVERVISGEGSHGMFGGYLYFSKAPSKEEFLPEAMRXIKALLXYDCLRATRSTFDRGLEARVPFLNKECYEXAMNIDPQCAMI

SEQ ID NO: 12537 - protein, 286 aa, Cucurbita cv. Kurokawa Amakuri
MALPVVDTEYLKEIEKARRDLRALIANRNCAPIMLRLAWHDAGTYDVSTKTGGPNGSIRNQEEYSHGSNNGLKKAIDFCEEVKSKHPKITYADLYQLAGVVAVEVTGGPTIDFVSGRKDSRISPREGRLPDAKKGAPHLRDIFYRMGLSDKDIVALSGGHTLGRAHPERSGFDGPWTEDPLKFDNSYFVELLKGESEGLLKLPTDKALLEDPEFRPYVELYAKDEDAFFKDYAESHKKLSELGFTPGSARAIANDSTVLAQGAVGVAVAAAVVILSYFYEIRKNLK

SEQ ID NO: 12538 - protein, 454 aa, Listeria monocytogenes str. 4b H7858
METYFEDAVGGIHLLPFFPSTGDRGFAPSDYTTVDSDLGSWEIIEKLGEKYYLMFDFMINHISRESLFFQDFKKEHLNSKYKDMFIRINDFFPPGRPNEKDLDLIYKRKDKAPFQEVEFADGGTELVWNTFGEEQIDLDVTAEVTKEFIRQTIKNMAAHGCSILRLDAFAYAIKKLDTNDFFVEPEIWGLLDEVKAEAAKYDMELLPEIHEHYSIQMKIANHDYYIYDFALPMVMLYSLYSGRVERLAKWLEMSPMKQFTTLDTHDGIGVVDARDLLTDEELDYTSAELYKIGANVKKIYSSEKYNNLDIYQINSTYYSALGDDDKSYLLARVIQCFAPGIPQIYYVGLLAGKNDIDLLEETKEGRNINRHYYTIDEIKNEVKRPVVKALCNLLRFRNTSEAFDLEGSIEIETPSSNEIVIIRKNKTNKITAILKANLSTKTFQISENERNILI

SEQ ID NO: 12539 - protein, 327 aa, Zea mays
SSSQRPAYSVLAYIEPSALRVRLAVRHPSQDYPGGRRTEGKGTEPTTNPMPPHRAGGAAGGGDTSAFFAATLVLWAVSVGFEIGVRGRRELAPVAAGFAFFQAANTAVRGSVSRDPLFVNTAVSLLHSSLTSVSVIFVLANQWRNKGLENMFEHEELFGGSWIGAYSALCFSCGYFAYDQLDMLRYRLYSGWLPGILMHHLILLICFTLALYRNVTINYLNLSLVCELHSIFLHVRKVRRMVGFRDFDRTVVKLEWVLNWTTFVTARVICHILITYKLISDAHKFGKGIELPLALLGMAGMNLLNIFLGLDLLKAFTRERNKQNHQD

SEQ ID NO: 12540 - protein, 486 aa, Vibrio vulnificus YJ016
MEVTAHYIGGKPFVGDTGESFATLNPATGEVLAHIEQADERVLAHAIESAKLGFSVWSSMSAAERSRCLLKAAQLIRDHNDELAELEVRDTGKPIQEASVVDIATGADVIEYFAGLVNGLGGEQQSLGSNQFFYTRREPLGICAGIGAWNYPIQIAMWKAAPALAAGNAMIFKPSEETPLSALKLAELFTQAGVPDGVFNVVQGDYRVGQMLTAHPEIAKVSFTGESGTGKKVMADSAATLKPVTMELGGKSPLIIFDDADLDDAVSAAMVANFYTQGEVCTHGTRVYVQRAMYDAFVEQLKERTEKLIVGDPMNMETQIGSLISKSHLEKVLGAISSAKESGATLLTGGFQVTERGLEKGCFVAPTVFVDCRDEMPHVQNEIFGPVMSVLVFDDEDEVIARANNTQYGLAAGVFTQNLSKAHRVIHQLQAGICWINTWGNSPAEMPVGGYKLSGIGRENGQETLLHYTQTKSVFVELGAFDSPYA

SEQ ID NO: 12541 - protein, 212 aa, Zea mays
  misc_feature (53)..(53): Xaa can be any naturally occurring amino acid
  misc_feature (191)..(193): Xaa can be any naturally occurring amino acid
MDEEEHEVYGQEIPEDGDMDGADVDMAASGDDAAKLQELDEMKRRLKEMEEEXAALRDMQAKVAKEMQGGDPSTSTAEAKEQVDARSVYVGNVDYACTPEEVQQHFQACGTVNRVTILTDKFGQPKGFAYVEFLEQEAVQEALNLNESELHGRQIKVAPKRTNVPGMKQRPPRGYNPYHGYPYRSYGAPYXXXYGYGRAPRFRRPMRYRPYF

SEQ ID NO: 12542 - protein, 363 aa, Yersinia pestis
MTKTYHIAVLPGDGIGPEVMAQASKVLDAVRQRFGLKISTSVYDVGGAAIDRHGSPLPAATVAGCEQADAILFGSVGGPKWEHLPPAEQPERGALLPLRKHFKLFSNLRPARLYQGLEDFCPLRSDIAARGFDILCVRELTGGIYFGQPKGREGQGMHERAFDTEVYHRFEIERIARIAFESARKRRSKVTSIDKANVLQSSILWREVVNGIAADYPDVALSHMYIDNATMQLIKDPSQFDVLLCSNLFGDILSDECAMITGSMGMLPSASLNEQGFGLYEPAGGSAPDIAGKNIANPIAQILSLTLLLRFSLGKDDAADAIERAINQALEQGYRTADLAGDGHAIGTHEMGDIIAKFVVEGV

SEQ ID NO: 12543 - protein, 259 aa, Hydrogenobacter thermophilus
MERIWKTGITQHIGHETYIRGYRLLDLVGNLSFAQAIYLILKGELPTERESRMMEAMLVSVIDHGIAPPSAIAARSVASGGNSLNVGVAAGVLAFGSAHGGALEDAMRFIQEGVSSKRSVEDIVKEYLETKKPIPGYGHRYYKDFDPRTKRLMDIARVLEFYGEHCKFAEDVAEEIGRQKGKKLVLNVDGAIAAIASEMGFDWRLGKGFFIIGRVPGLVAHVYEELTTEKPFSKRLDEERDVEYTGSPPRELPQELKKI

SEQ ID NO: 12544 - protein, 335 aa, Xanthomonas campestris pv. campestris str. ATCC 33913
MTQTITVIRGDGIGPEIMDATLFVLDALQAGLTYEYADAGLVALEKHGDLLPESTLASITKNKVALKSPLTTPVGEGFSSINVAMRRKFDLYANVRPAKSFPNTKSRFADGVDLITVRENTEGAYLSEGQEVSADGEVAVSGARVTRKGSERIVRYAFDLARATGRKKVTAVHKANIIKSTSGLFLKVARDVATQYPEIEFQEMIVDNTCMQLVMRPEQFDIIVTTNLFGDIISDLCAGLVGGLGLAPGANIGVDAAIFEAVHGSAPDIAGQGKANPCALLLGAAQMLDHIGQPQNAERLREAIVATLEAKDSLTPDLGGTGNTMGFAKAIASRL

SEQ ID NO: 12545 - protein, 176 aa, Glycine max
  misc_feature (115)..(115): Xaa can be any naturally occurring amino acid
  misc_feature (143)..(143): Xaa can be any naturally occurring amino acid
  misc_feature (153)..(153): Xaa can be any naturally occurring amino acid
MASSMISSPAVTTVNRAGAGMVAPFTGLKSMAGFPTRKTNNDITSIASNGGRVQCMQVWPPVGKKKFETLSYLPDLDDAQLAKEVEYLLRKGWIPCLEFELEHGFLYHEHNRSPXYYDGRYWTMWKLPMFGCADASHVLKDLXDAKTGYPDGXVRIMGCDTFGSADRELICYNLPR

SEQ ID NO: 12546 - protein, 410 aa, Glycine max
MPGHRSKSEKHGGGGEKPLRRDPYEVLGISRNSTDQEIKTAYRKMALKYHPDKNANDPKAADMFKEATFSYNILSDPDKRRQYDSAGFEAVESDNQELELDLSSLGAVNTMFAALFSKLGVPIKTTVSATVLEEALNGLVTIRPLPLGHNIAKRVEKQCAHFYSVTITEEEAQAGFVCRVQSPDKSKFKLLYFDQEDNSGLSLALQEDSAKTGKVTSAGMYFLGFPVYRLDQTMNSIAAAKDPDTSFFRKLDAFQPCELTELKAGTHVFAVYGDNFFKSANYTIEALCAAPFSEEKENLRNIEAQILSKRAEISKFEAEYREVLAQFSDMTNRYAHEMQAIDELLKNRNEIQASYTSAPLKRTTSRSRSKNSSKEAKEDGQAKEKRSTRERPKKKKWYNLHLRVDKRKAC

SEQ ID NO: 12547 - protein, 505 aa, Brucella melitensis 16M
MNKVEFSRTVKPAFAKRYGNFIGGKWVEPRSGRYFENTSPVNGQVLCEVARSDAADVEAALDAAHAARELWGRTSVAERALILNRIADRIEENLPALAAAETWDNGKPIRETTNADLPLAVDHFRYFAGVIRAQEGGISEIDHDTVAYHFHEPLGVVGQIIPWNFPLLMATWKLAPALAAGNCVVLKPAEQTPASILVLMELIADILPPGVVNIVNGFGLEAGKPLASSPRIAKIAFTGETTTGRLIMQYASQNLIPVTLELGGKSPNIFFKDVAAEDDDFLDKAIEGFVMFALNQGEVCTCPSRALIQESIYDRFMEKALKRVEAIVQGDPLDPATMIGAQASSEQLEKILSYLDIGRQEGAEVLAGNERNMLPGDLAGGYYVKPTVFKGHNKMRIFQEEIFGPVVSVATFKDDAEALSIANDTLYGLGAGIWTRDGTRAYRFGRAIKAGRVWTNCYHAYPAHAAFGGYKQSGIGRENHLKMLDHYQNTKNMLVSYSPKKLGFF

SEQ ID NO: 12548 - protein, 331 aa, Cicer arietinum
MSNKIWPPPPSNNPYEYLKIHHNPNDTLTRNLVDPHTSPSSNTTLPINVLTKDLTINQSHQTWLRLFLPKNSTNPNQNNKLPLIIFFHGGGFILLSAASTIFHDFCVELADTVEAVVASVEYRLAPEHRLPAAYDDAMEALTFIKSSEDEWLQNYVDFSTCYLMGNSAGATIAYNAGPMCNLKKVNDFEPLKIQGLILSQPFFGGTQRSESELRLENDPVLPLSVGDLMWELALPIGVDRDHKYGNLTAENDLDEKFDKIKDQGWRVLVSGNGGDPLVDRYKELVELMEKKGVEIVKDFEEEGFHGIEFFEPSKAKKLIGLVKGFISSFVV

SEQ ID NO: 12549 - protein, 302 aa, Cucumis sativus
MAFAKAQKTKAYFKRYQVKFKRRREGKTDYRARIRLINQDKNKYNTPKYRFVVRTSNKDITAQIISASIAGDLVLASAYSHELPQYGLEVGLTNYAAAYCTGLLLARRVLKMLEMDAEYEGNVEATGEDYSVEPADTRRPFRALLDVGLIRTTTGNRVFGALKGALDGGLDIPHSDKRFAGYAKNGQQLDVEVHRKYIFGGHVAAYMRTLMEDEPEKYQSHFSEYIKKGIEADELEGLYKKVHAAIRANPIAKKSDKPQPKAHKRYNLKKLTYDERKARLVERLNALNSAADGDDDDDEDDE

SEQ ID NO: 12550 - protein, 214 aa, Zinnia elegans
MAIEICVKAATGAPDDLGDCPFSQRVLLTLEEKKVPYKTHLINLDNKPEWFVEVNPDGKVPLIKFDEKWVSDSDVIVGLIEEKYPEPSLSTPSEFASVGSKIFPKFVGFLKSKDEKDGTEQALLDELNELEEHLKKNGPYVNGEKISAVDLSLAPKLYHLKVALGHFKKWTVPESLTHVHDYMKSLFSRESFEKTKPAKEEYVVAGWAPKVNNA

SEQ ID NO: 12551 - protein, 1342 aa, Escherichia coli O157:H7 EDL933
  misc_feature (1258)..(1258): Xaa can be any naturally occurring amino acid
MSQEYTEDKEVTLTKLSSGRRLLEALLILIVLFAVWLMAALLSFNPSDPSWSQTAWHEPIHNLGGMPGAWLADTLFFIFGVMAYTIPVIIVGGCWFAWRHQSSDENIDYFAVSLRIIGVLALILTSCGLAAINADDIWYFASGGVIGSLLSTTLQPLLHSSGGTIALLCVWAAGLTLFTGWSWVTIAEKLGGWILNILTFASNRTRRDDTWVDEDEYEDDEEYEDENHGKQHESRRARILRGALARRKRLAEKFINPMGRQTDAALFSGKRMDDDEEITYTARGVAADPDDVLFSGNRATQPEYDEYDPLLNGAPITEPVAVAAAATTATQSWAAPVEPVTQTPPVASVDVPPSQPTVAWQPVPGPQTGEPVIAPAPEGYPQQSQYAQPAVQYNEPLQQPVQPQQPYYAPAAEQPAQQPYYAPAPEQPVAGNAWQAEEQQSTFAPQSTYQTEQTYQQPAAQEPLYQQPQPVEQQPVVEPEPVVEETKPARPPLYYFEEVEEKRAREREQLAAWYQPIPEPVKEPEPIKSSLKAPSVAAVPPVEAAAAVSPLASGVKKATLATGAAATVAAPVFSLANSGGPRPQVKEGIGPQLPRPKRIRVPTRRELASYGIKLPSQRAAEEKAREAQRNQYDSGDQYNDDEIDAMQQDELARQFAQTQQQRYGEQYQHDVPVNAEDADAAAEAELARQFAQTQQQRYSGEQPAGANPFSLDDFEFSPMKALLDDGPHEPLFTPIVEPVQQPQQPVAPQQQYQQPQQPVAPQPQYQQPQQQVAPQPQYQQPQQPVAPQQQYQQPQQPVAPQPQYQQPQQPVAPQPQYQQPQQPVAPQPQDTLLHPLLMRNGDSRPLHKPTTPLPSLDLLTPPPSEVEPVDTFALEQMARLVEARLADFRIKADVVNYSPGPVITRFELNLAPGVKAARISNLSRDLARSLSTVAVRVVEVIPGKPYVGLELPNKKRQTVYLREVLDNAKFRDNPSPLTVVLGKDIAGEPVVADLAKMPHLLVAGTTGSGKSVGVNAMILSMLYKAQPEDVRFIMIDPKMLELSVYEGIPHLLTEVVTDMKDAANALRWCVNEMERRYKLMSALGVRNLAGYNEKIAEADRMMRPIPDPYWKPGDSMDAQHPVLKKEPYIVVLVDEFADLMMTVGKKVEELIARLAQKARAAGIHLVLATQRPSVDVITGLIKANIPTRIAFTVSSKIDSRTILDQAGAESLLGMGDMLYSGPNSTLPVRVHGAFVRDQEVHAVVQDWKARGRPQYVDXITSDSESEGGAGGFDGAEELDPLFDQAVQFVTEKRKASISGVQRQFRIGYNRAARIIEQMEAQGIVSEQGHNGNREVLSPPPFD

SEQ ID NO: 12552 - protein, 432 aa, Dechloromonas aromatica RCB
MSTREQQIAALEKDWAENPRWKGIKRGYSAADVVRLRGSFQVEHTLARRGAEKLWDLVNNTPYVNCLGALTGGQAVQQAKAGIKAIYLSGWQVAADNNEYAAMYPDQSLYPVDSVPKVVERINNSFNRADEIQWSKNINAGDAGHVEYHLPIVADAEAGFGGVLNAYELMKAMIRAGAAGVHWEDQLASVKKCGHMGGKVLVPTTEAVQKLIAARMAADVYGVPTLVIARTDAEAADLLTSDYDENDKPFLTGERTAEGFYKTRKGLDQAISRAIAYADYADLVWCETGTPDLEYARKFAEAVHKVHPGKMLAYNCSPSFNWKKNLDDATIAKFQKELGAMGYKYQFITLAGIHSMWYNMFDLAQDYAARGMSAYVEKVQEPEFAARDRGYTFVSHQQEVGTGYFDDVTTVIQGGKSSVTALTGSTEEEQFH

SEQ ID NO: 12553 - protein, 449 aa, Glycine max
  misc_feature (21)..(21): Xaa can be any naturally occurring amino acid
SSRACQKYGSIFKRPQGLFIXLKEKGKILEVLKNWPEKSIQVIVVTDGERILGLGDLGCQGMGIPVGKLALYTALGGVRPSACLPITIDVGTNNEKLLNDEFYIGLRQKRATGQEYSELLHEFMTAVKQNYGEKVLVQFEDFANHNAFELLAKYGTTHLVFNDDIQGTASVVLAGVVAALKLIGGTLADHTFLFLGAGEAGTGIAELIALEMSKQTKTPIEETRKKIWLVDSKGLIVGSRKASLQHFKQPWAHEHEPVGSLLEAVKVIKPTVLIGSSGVGKTFTKEVIEAVTSINEKPLVLALSNPTSQSECTAEEAYQWSEGRAIFASGSPFDPVEYKGKVYYSGQANNAYIFPGFGLGLVISGAIRVHDDMLLAASEALAKLVSNENYEKGLIYPPFSNIREISANIAASVAGKAYELGLATRLPRPQNLVKYAESCMYSPVYRNYR

SEQ ID NO: 12554 - protein, 343 aa, Burkholderia fungorum LB400
MKALAKLERAPGLTLTDVKKPEVGHNDVMIRITRTAICGTDIHIWKWDDWAQKTIPVPMHVGHEYVGEIVEMGQEVRGFAIGDRVSGEGHITCGFCRNCRAGRRHLCRNTVGVGVNREGAFAEYLVIPAFNAFKIPPEISDDLAAIFDPFGNATHTALSFNLVGEDVLITGAGPIGIMAVAIAKHVGARNVVITDVNDYRLELARKMGATRAVNVSRESLRDVMADLHMAEGFDVGLEMSGVPSAFTGMLEAMNHGGKIALLGIPPAQTAIDWTQVIFKGLEIKGIYGREMFETWYKMVAMLQSGLDLSPILTHHFKVDDYREAFATMLSGESGKVILDWTAA

SEQ ID NO: 12555 - protein, 319 aa, Thermotoga maritima MSB8
MKKIAVLTSGGDAPGMNAAVRAVVRYGVRQGLEVIGVRRGYSGLIDGDFVKLEYKDVAGITEKGGTILRTSRCEEFKTEEGRELAAKQIKKHGIEGLVVIGGEGSLTGAHLLYEEHKIPVVGIPATIDNDIGLTDMCIGVDTCLNTVMDAVQKLKDTASSHERAFIVEVMGRHSGYIALMAGLVTGAEAIIVPEIPVDYSQLADRILEERRRGKINSIIIVAEGAASAYTVARHLEYRIGYETRITILGHVQRGGSPTAFDRRLALSMGVEAVDALLDGEVDVMIALQGNKFVRVPIMEALSTKKTIDKKLYEIAHMLS

SEQ ID NO: 12556 - protein, 341 aa, Glycine max
IRLERLEQRLTKCQPFDAPEPNQLIWPNLKIKYFQRELRQYLVYFIVALTIFFYMIPITFISAFTTLDNLVKYLPFIKPIVNIKALRTVLEAYLPQLALIIFLALLPKLLLFLSKFEGIPTESHAVRAASGKYFYFTVLNVFIGVTIGGTLFKAFKRIREHPTLDEISSLLAESLPGNATFFLTYVALKFFIGYGLELSRIVPLIIYHLKRKYLCKTEAELKEAWRPGDLGYGTRVPGDMLIVTIVFCYSVIAPVIIPFGALYFGLGWLVLRNQALKVYVPTFESYGRMWPHIHNRILASLILYQITMFGYFGTQKFYYTPLVLPLPILSLIFGFVCAKKF

SEQ ID NO: 12557 - protein, 454 aa, Populus sieboldii x Populus grandidentata
DLNHRNLTDLAKKFGDILLLRMGQRNLVVVSSPDLAKEVLHTQGVEFGSRTRNVVFDIFTGKGQDMVFTVYGEHWRKMRRIMTVPFFTNKVVQQYRHGWEEEAAQVVEDVKKNPEAATHGIVLRRRLQLMMYNNMYRIMFDRRFESEEDPLFNKLKALNGERSRLAQSFDYNYGDFIPILRPFLRGYLKICKEVKERRLQLFKDYFVEERKKLGSTKSMSNEGLKCAIDHILDAQKKGEINEDNVLYIVENINVAAIETTLWSIEWGIAELVNHPEIQKKLRDELDTVLGPGHQITEPDTYKLPYLNAVIKETLRLRMAIPLLVPHMNLHDAKLGGFDIPAESKILVNAWWLANNPAKWKNPEEFRPERFFEEEAKVEANGNDFRYLPFGVGRRSCPGIILALPILGITLGRLVQNFELLPPPGQSKIDTSEKGGQFSLHILKHSTIVAKPRSF

SEQ ID NO: 12558 - protein, 372 aa, Bacillus methanolicus
MTVTRGLEGVVATTSSISSIIDDTLTYVGYNIDDLADNASFEEVIFLLWHRKLPTKSELEELKILLAENAELPKEILDHFKMYPIDKVHPMAALRSAVSLLGLYDEEADLMDEEANYRKAIRLQAKIPSIVAAFARVRKGLEPVAPRKDLSFAANFLYMLKGKEPEDIAVEAFNKVLVLHADHELNASTFTARVCVATLSDIYSGVTAAIGALKGPLHGGANEAVMKMLTEIGSLENVEPYIREKLAKKEKIMGFGHRVYRKGDPRAKHLREMSKKLTELTGEPHWYEMSTKIEAIVTGEKGLPPNVDFYSASIYHSLGIDHDLFTPIFAVSRISGWLAHILEQYENNRLIRPRADYIGPGMQKFIPIEQRG

SEQ ID NO: 12559 - protein, 66 aa, Glycine max
ICYTENQVNGEIYNHEELRKQLPNHTFRTGSDCDVIAHLYEEHGENFVDMLDGIFSFVLLDTRDNS

SEQ ID NO: 12560 - protein, 168 aa, Avena sterilis subsp. ludoviciana
VMASSATSVAPFQGLKSTAGLPVSRRSNAGLGSVSNGGRIRCMQVWPIEGIKKFETLSYLPPLTEEALLKQIDFLIRSKWVPCLEFSQGGFIFREHGSTPGYYDGRYWTMWKLPMFGCTDASQVIKEVEEVKKEYPDAYVRIIGFDNIRQVQCVSFIAFKPPGCEESG

SEQ ID NO: 12561 - protein, 358 aa, Gibberella zeae PH-1
MASATRQFARAATRATRNGFAIAPRQVIRQQGRRYYSSEPAQKSSSAWIWLTGAAVAGGAGYYFYGNSASSATAKVFNPSKEDYQKVYNEIAARLEEKDDYDDGSYGPVLVRLAWHASGTYDKETGTGGSNGATMRFAPESDHGANAGLAAARDFLQPVKEKFPWITYSDLWILAGVCAIQEMLGPAIPYRPGRSDRDVSGCTPDGRLPDASKRQDHLRGIFGRMGFNDQEIVALSGAHALGRCHTDRSGYSGPWTFSPTVLTNDYFRLLVEEKWQWKKWNGPAQYEDKSTKSLMMLPSDIALIEDKKFKPWVEKYAKDNDAFFKDFSNVVLRLFELGVPFAQGTENQRWTFKPTHQE

SEQ ID NO: 12562 - protein, 261 aa, Nicotiana tabacum
MEAANHNNDNGCTNESPYISSVLPGWFSEISPLWPGEAHSLKVEKILFQGKSDYQNVMVFQSSTYGKVLVLDGVIQLTERDECAYQEMIAHLPLCSIPNPKKVLVIGGGDGGVLREVSRHSSVEQIDICEIDKMVVEVSKQFFPDVAVGYEDPRVNLHIGDGVAFLKNVAAGTYDAVIVDSSDPIGPAQELFEKPFFDSIARALHPGGVVSTQAESIWLHMHIIEEIVANCRQIFKGSVNYAWTTVPTYPSGMIGFMLCST

SEQ ID NO: 12563 - protein, 492 aa, Gibberella zeae PH-1
MHFNTLTCVLVGLVAHTSAVPTKREAVNSCLTQAKVPTDAQGSQSWKEDGTAYNLRLPFEPAAIAVPTTVAQVSAAVECGAKHGVAISAKSGGHSYTSLGFGGEDGHLMIELDRMYSVKLAKDGTAKIQPGARLGHVATELWNQGKRALAHGTCPGVGLGGHALHGGYGMVARKHGLTLDLMIGATVVLPTGKVVHCSKTENSDLFWGIRGAGANFGVVVELEFQTFAAPEKITYFDIGLNWDQNTAPQGLYDFQEFGKGMPAEITMQMGVSKNGYSVDGAYIGDEASLRKALQPLVQKFGGVQVTATTVDWMGLVTHFAGAGVNVNPTSASYDAHDNFYASSLAAPALTLAEFKSFVNFVSTTGKSSSHSWWLQMDITGGTYSAVSKPKPSDTAYVHRDTLLLFQFYDSVAATAQYPSDGFNLIKGLRQSISSSLKAGTWGMYANYPDSQIKNDRATEMYWGSNVAKLEAVKAKYDPKNLFRNPQSIKPKA

SEQ ID NO: 12564 - protein, 154 aa, Rubrivivax gelatinosus PM1
MASGRRFVAAALLAGLLAGPAVAKDAPPLAEDPVLEARVMRIAAELRCLVCQNQTIADSHADLAVDLRRQVRSMLSEGRSQAEILQYMTDRYGDFVLYRPPVRTSTWLLWFGPFVLLVGGLVTLLLVLRRRARLSDDHFEPDEDDADGAGPRAP

SEQ ID NO: 12565 - protein, 168 aa, Triticum aestivum
  misc_feature (110)..(110): Xaa can be any naturally occurring amino acid
  misc_feature (114)..(114): Xaa can be any naturally occurring amino acid
  misc_feature (125)..(125): Xaa can be any naturally occurring amino acid
  misc_feature (132)..(132): Xaa can be any naturally occurring amino acid
  misc_feature (136)..(136): Xaa can be any naturally occurring amino acid
MAPTVMASSATSVAPFQGLKSTAGLPVSRRSNGASLGSVSNGGRIRCMQVWPIEGIKKFETLSYLPPLSTEALLKQVDYLIRSKWVPCLEFSKVGFIFREHNASPGYYDXRYWXTMWKLPMFGCXDATQVIXQVEXVKKEYLTRIPHHRIHNMRKMRQLAKPAQDPEG

SEQ ID NO: 12566 - protein, 269 aa, Corynebacterium glutamicum ATCC 13032
MTLSLPPIGFGTVHLDGAPGVEAIATAIDAGYRLIDTAYNYENEGTVGKAVRESGVPREELIVTSKLPGRFHARDLGRVRIEESLYRLNLDYIDLLLIHWPNPSKDLYVEAWETLIEVRDAGLVKHIGVSNFLPNHIDRLRRETGELPAVNQIELHPYFPQVEQVDFHDELGIITEAWSPLSNGRGLVEEPLLKEIGERYGVGSGEIALAWHHARGIVPIPRSTNPARQRSNLEAVKISLIDEDVQAITALARKNGRIKDQDPAVYEEF

SEQ ID NO: 12567 - protein, 122 aa, Euglena longa
MIQTQTYLNVSDNSGAKKIMCISIISTKRKYAKIGDTIIAVVKKASPNKIIKKSMIVKALIIRTTKPLYRKHNNMYISFNENAAIIINTDNTLKGTNIFGPVPRELMNIGFTNLNSTAKLII

SEQ ID NO: 12568 - protein, 343 aa, Thermus thermophilus HB27
MRALAKLAPEEGLTLVDRPVPEPGPGEILVRVEAASICGTDLHIWKWDAWARGRIRPPLVTGHEFSGVVEAVGPGVKRPQVGDHVSLESHVVCHACPACRTGNYHVCLNTKILGVDRDGGFAEYVVVPAENAWVNPKDLPFEVAAILEPFGNAVHTVYAGSGVSGKSVLITGAGPIGLMAAMVARASGAGPILVSDPNPYRLAFARPYADRLVNPLEEDLLEVVRRVTGSGVEVLLEFSGNEAAIHQGLMALIPGGEARILGIPSDPIRFDLAGELVMRGITAFGIAGRRLWQTWMQGTALVYSGRVDLSPLITHRLPLSRYREAFGLLASGQAVKVILDPKA

SEQ ID NO: 12569 - protein, 142 aa, Glycine max
MVLESTMICIDNSEWMRNGDYSPSRFQAQADAVNLICGAKTQSNPENTVGVMTMAGKGVRVLVTPTSDLGKILACMHGLEVGAEANLAAAIQVAQLALKHRQNKRQQQRIIVFIGSPVTYDKKVLETIGKKLKKNNVALDVV

SEQ ID NO: 12570 - protein, 352 aa, Triticum aestivum
  misc_feature (192)..(192): Xaa can be any naturally occurring amino acid
  misc_feature (306)..(306): Xaa can be any naturally occurring amino acid
MAASKQWTRVRTLGRGASGAEVFLAADDASGELFAVKSATAACASALKREEGLMACLHSPCVVSCLGGRSARDGSYHLFLEFAPGGSLADRVASNGGLDERAVRGYAADVAAGLAYLHGAGMVHGDVKARNVVIGADGRAKLADFGCSRKAGADVPIIGGTPAFMAPEVARGEEQGPAADVWALGCTVVEMXTGRAPWSGMDGHALAALHRIGYTEAVPELPQWLSAEARDFLGGCLVRQASDRCTAAQLLEHPFLASAGGHAKPKATESSWCRPRHPEGGFWESESKPGRGSTKPGPKRNKALAXPASGLPEVDPKGGWMGLLSGPTGAPKQGPVRPRSHRIYAGEVFKGK

SEQ ID NO: 12571 - protein, 229 aa, Triticum aestivum
  misc_feature (217)..(217): Xaa can be any naturally occurring amino acid
MGTMAPSPALLPVLLLLPLLLLSVVCTAGAAPAATATVPTIPSQPGKPNSNNKQKQGGAPLGPAVRALVQSTCNATTYYDLCVAALVADPASSTADLRGLCAIAVSAAAANASATASALANTTWAASGAPEPGSDGRAQQVPALLTRTCAGKYGEAREALLEARESVGEEAYDYAFVHVGAAAEYPAVCRTMFRRKRVPYPVELAGGRRRWRPLNRXIDSHAPAYLYKD

SEQ ID NO: 12572 - protein, 296 aa, Escherichia coli O157:H7 EDL933
MSFDLIIKNGTVILENEARVVDIAVKGGKIAAIGQDLGDAKEVMDASGLVVSPGMVDAHTHISEPGRSHWEGYETGTRAAAKGGITTMIEMPLNQLPATVDRASIELKFDAAKGKLTIDAAQLGGLVSYNIDRLHELDEVGVVGFKCFVATCGDRGIDNDFRDVNDWQFFKGAQKLGELGQPVLVHCENALICDALGEEAKREGRVTAHDYVASRPVFTEVEAIRRVLYLAKVAGCRLHVCHISSPEGVEEVTRARQEGQDVTCESCPHYFVLDTDQFEEIGTLAKCSPPIRDLEN

SEQ ID NO: 12573 - protein, 302 aa, Zea mays
MAGMSLQHPWAFAFGLLGNVISFMTFLAPIPTFYRIYKSKSTEGFQSVPYVVALFSAMLWIFYALIKSNETFLITINAAGCVIETIYVVMYFVYAPKKAKLFTAKIMVLLNGGVFGVILLLTLLLFKGSKRVVLLGWICVGFSVSVFVAPLSIMRRVIQTKSVEYMPFSLSLSLTLSAVVWFLYGLLIKDKYVALPNILGFTFGVVQMVLYVLYMNKTPVAATAEGKDAGKLSSAADEHVLVNIAKLSPALPERSSGVHPVTQMAGVPVRSCAAEATAPAMLPNRDVVDVFVSRHSPAVHVA

SEQ ID NO: 12574 - protein, 103 aa, Zea mays
MHGRTAMAVACLLCMTALLLVQDVQSRRLLWTEQEKKQTHGGLVGNHGAADRRSTSLEPCSGAMGGGGTGSADKQGEFPCDDDTSKWTELHTDYIYTQDFKHP

SEQ ID NO: 12575 - protein, 485 aa, Agrobacterium tumefaciens str. C58
MQNKVQFITYVDRLTRGGFRQLKELVDGKFAGLFGGVHVLPFFNPIDGADAGFDPTDHTIVDPRLGDWEDVRALSGSVEIMADLIVNHVSSQSGAFTDFIAKGSASEFADMFMTFDKVFPDGATEEDLLRIYRPRPGLPFSKVTLADGTQRMLWTTFTPEQIDIDVHSAKGTTYLETILDRFSEANVTAIRLDAAGYAIKKAGSSCFMIDDTYAFLEEVAGKARNRGMEVLVEIHSYHRDQIEIAKKVDRVYDFALPPLILHALFTGDATPLAKWLAISPRNAITVLDTHDGIGVIDVGAHSDGRAGLLEPQAIDNLVGEIHRRSDGQSRQATGAAASNLDLYQVNCTYYDALGRNDNDYLIARAIQFFAPGIPQVYYVGLLGGVNDMDLLAKTGVGRDINRHYYGNDEIGTALETPLFHRLSNLIRFRNTHPAFGGALKATIADAGALVLSWQHGDAFAELKISFADRKASIAASGQSEMQIVE

SEQ ID NO: 12576 - protein, 291 aa, Glycine max
  misc_feature (27)..(27): Xaa can be any naturally occurring amino acid
  misc_feature (49)..(49): Xaa can be any naturally occurring amino acid
  misc_feature (78)..(78): Xaa can be any naturally occurring amino acid
  misc_feature (84)..(84): Xaa can be any naturally occurring amino acid
  misc_feature (90)..(90): Xaa can be any naturally occurring amino acid
  misc_feature (109)..(110): Xaa can be any naturally occurring amino acid
  misc_feature (118)..(118): Xaa can be any naturally occurring amino acid
  misc_feature (222)..(222): Xaa can be any naturally occurring amino acid
FSCWKAGKVQSIFFFWESKEVCNREDXRKLLPPDHVIRACQDLASKEYXEEVYAAYDKHKLETWDFPKATKFTGIEMXEEEAVXEQQRMXAEARARMNNGAAKPKEPAXXPQNQPQQXPPQLHLQVHLKAQQPPQPQPQLHHPQSQQPLHPQLQPYTQAPPQQPLHPQLQPYTQAPPQQPLQPPLQLYPQAQPEQPLQPQSSGSTTGTCVISTAAPSATGTXLLLQPPPQQSPQSQLQLHQQPQPMQVPLPPLPQPQPQPPELQQPQPLTQLQAEHGLNWTVSGSEHVASL

SEQ ID NO: 12577 - protein, 308 aa, Zea mays
PRASWPEVTPMTSLAAADLALQAGIPAGALNVVMGNAPEIGDALLQSTQVRKITFTGSTAVGKKLMAESANTVKKVSLELGGNAPCIVFDDADIDVAVKGSLAAKFRNSGQTCVCANRILVQEGIYEKFASAFIKAVQSLKVGNGLEESTSQGPLINEAAVQKVEKFINDATSKGANVMLGGKRHSLGMSFYEPTVVGNVSNDMLLFREEVFGPVAPLIPFKTEEEAVHMANDTNAGLAAYIFTKSIPRSWRVSESLEYGLVGVNEGIISTEVAPFGGVKQSGLGREGSKYGVDEYLELKYICMGNLG

SEQ ID NO: 12578 - protein, 136 aa, Arabidopsis thaliana
MASSMLSSATMVASPAQATMVAPFNGLKSSAAFPATRKANNDITSITSNGGRVNCMQVWPPIGKKKFETLSYLPDLTDSELAKEVDYLIRNKWIPCVEFDTDLCTVSTVTHPDTMMDGTGQCGSFPCSVAPTPLKC

SEQ ID NO: 12579 - protein, 402 aa, Oryza sativa
MVLEATMICIDNSEWMRNGDYSPSRFQAQADAVNLICGAKTQSNPENTVGVMTMAGKGVRVLVTPTSDLGKILACMHGLEVGAEANLAAAIQVAQLALKHRQNKRQQQRIIAFIGSPVKYDKKVLETIGKKLKKNNVALDIVDFGETDDDKPEKLEALISAVNSSDSSHIVHVPPGENALSDVLISTPIFTGEEGGSGFAASAAAAAATGAAGFEFDVDPNVDPELALALRLSMEEERARQEAIAKKAAEESSGAENKDHASSSNADSVMAEAEPASNAADDKKDQPKEDDDAQLLQQALAMSMEEGSSGAAAADAAMAEAAVDDQDLALALQMSVQDAGGSSQSDMSKVFEDRSFVTSILNSLPGVDPNDPSVKDLLASLHGQGEQEKKEDKSDKPEDEKK

SEQ ID NO: 12580 - protein, 408 aa, Shewanella oneidensis MR-1
MTVSELRFALDTFYFLISGALVMWMAAGFAMLEAGLVRSKNTTEILTKNVVLYAIACVMYLLVGYNIMYVDNAEGGWLPSFGTLIGSQAADANHALESDFFFQVVFVATAMSIVSGAVAERMKLWAFLVFSVVMTGIIYPVEGYWTWGKGFIASLGFVDFAGSGIVHMTGAAAAIAGVLLLGARKGKYGPNGQVNPIPGSNLPMATLGMFILWMGWFGFNGGSQLMVSDAANASAVAKVFVNTNTAAALGAISALIVCKMIWGKADLTMILNGILAGLVAITADPLSPSLLMAGVIGLVAGGLVVFSIVGLDRIKIDDPVGAISVHGVAGFLGLMCVPLSNANATITAQLTGAAIIFAWVFSASFAVWFVLKMTMGIRVSEEEEYNGMDASDCGIDAYPEFVTVKSAG

SEQ ID NO: 12581 - DNA, 844 bp, Oryza sativa
ctcgaggtcattcatatgcttgagaagagagtcgggatagtccaaaataaaacaaaggtaagattacctggtcaaaagtgaaaacatcagttaaaaggtggtataaagtaaaatatcggtaataaaaggtggcccaaagtgaaatttactcttttctactattataaaaattgaggatgtttttgtcggtactttgatacgtcatttttgtatgaattggtttttaagtttattcgcttttggaaatgcatatctgtatttgagtcgggttttaagttcgtttgcttttgtaaatacagagggatttgtataagaaatatctttaaaaaaacccatatgctaatttgacataatttttgagaaaaatatatattcaggcgaattctcacaatgaacaataataagattaaaatagctttcccccgttgcagcgcatgggtattttttctagtaaaaataaaagataaacttagactcaaaacatttacaaaaacaacccctaaagttcctaaagcccaaagtgctatccacgatccatagcaagcccagcccaacccaacccaacccaacccaccccagtccagccaactggacaatagtctccacacccccccactatcaccgtgagttgtccgcacgcaccgcacgtctcgcagccaaaaaaaaaaaaagaaagaaaaaaaagaaaaagaaaaaacagcaggtgggtccgggtcgtgggggccggaaacgcgaggaggatcgcgagccagcgacgaggccggccctccctccgcttccaaagaaacgccccccatcgccactatatacatacccccccctctcctcccatccccccaaccct

SEQ ID NO: 12582 - DNA, 838 bp, Hordeum vulgare
catcgattttaaaaaaaagttcatacctttcaaaaacgttcatcaatttttttaaaaagttcactaaaaatgaaaaaaagttcatccaatttaaaaaaagttcattaattttttataaatttcaataaatttgaaaaaacttcataaaattcaacaaaagttcattgaagtgaaaaaagctcataaatctttaaaaagtgcatccattttcaaaaagatgttcatcaaaattcaatatagttcaccaatattcaaaaaagttcattaatcttaaaaaatattcgctaaaatttaaaaaatgtttatcaatatttaaacggcgtctagatgagccggtctatttacaaacaccataggcgccaattaacaaaaatgcacgttagatcacgtctacggcgtcaaataggaaatgcccatcggccttactattaagagttgttttggttatcctttaggatttatgctgtgggctggacttaacacaaaacccacagccatggtaggccggaatctattattcagctcacaaacgatgttctactcaaaagaagaaaaaaatctgttgtcagaaaaagagaacaaaaaaggctcacgaacatgccgcggctcgcacaggtggccgtgagcttctgaatgacttggccacccggcatgtccactgcccccctagacggtgtgggtgggtggacaggtcaagcgcattgaacaaggtcaccctgcgttctgccacgaggccaactgcgtggccctcatgcaacgcgccttgctgccacttctacacacgccctcgccggccgaccgctgctataaaagcagctccccgttgcgtcctcgacgg

SEQ ID NO: 12583 - DNA, 828 bp, Glycine max
ggcaaaaacatttaatacgtattatttaagaaaaaaatatgtaataatatatttatattttaatatctattcttatgtattttttaaaaatctattatatattgatcaactaaaatatttttatatctacacttattttgcatttttatcaattttcttgcgttttttggcatatttaataatgactattctttaataatcaatcattattcttacatggtacatattgttggaaccatatgaagtgtccattgcatttgactatgtggatagtgttttgatccaggcctccatttgccgcttattaattaatttggtaacagtccgtactaatcagttacttatccttcctccatcataattaatcttggtagtctcgaatgccacaacactgactagtctcttggatcataagaaaaagccaaggaacaaaagaagacaaaacacaatgagagtatcctttgcatagcaatgtctaagttcataaaattcaaacaaaaacgcaatcacacacagtggacatcacttatccactagctgatcaggatcgccgcgtcaagaaaaaaaaactggaccccaaaagccatgcacaacaacacgtactcacaaaggtgtcaatcgagcagcccaaaacattcaccaactcaacccatcatgagcccacacatttgttgtttctaacccaacctcaaactcgtattctcttccgccacctcatttttgtttatttcaacacccgtcaaactgcatgccaccccgtggccaaatgtccatgcatgttaacaagacctatgactataaatatctgcaatctcggcccaggttttc

SEQ ID NO: 12584 - DNA, 523 bp, Zea mays
atcggaatattagcatgtcaacttgcactctctaaggctcctttggaaagcaggattttagaaaaaaaaatcatataaattttttacatgaatcagtttattttcggattatgaaatattttctcataacagtataacacatattttgtatataagttattatgttattatatataaccgttgcaacgtacgggcattcacctagtaaagaaagaagattaattattctctggtggagattgtgcccgagcccgaaggtcatgatatggacgttgcaaacccacttcacgaggggacaaaaaagaaatagggttaccactttcatcagttaaagggcgtgacatggacgtgttgaagatccggcacattccctgcgaaatatacacgtcatggtactaacgaggcatgaaactggccacatggccatggacgcgtgaagcgtgccatgcattggacatgcggcatccgaacttctgaagatcatatcagagagacactgatgtacgaactgccgtaacattct

SEQ ID NO: 12585 - DNA, 786 bp, Zea mays
gacatggaggtggaaggcctgacgtagatagagaagatgctcttagctttcattgtctttcttttgtagtcatctgatttacctctctcgtttatacaactggttttttaaacactccttaacttttcaaattgtctctttctttaccctagactagataattttaatggtgattttgctaatgtggcgccatgttagatagaggtaaaatgaactagttaaaagctcagagtgataaatcaggctctcaaaaattcataaactgttttttaaatatccaaatatttttacatggaaaataataaaatttagtttagtattaaaaaattcagttgaatatagttttgtcttcaaaaattatgaaactgatcttaattatttttccttaaaaccgtgctctatctttgatgtctagtttgagacgattatataattttttttgtgcttaactacgacgagctgaagtacgtagaaatactagtggagtcgtgccgcgtgtgcctgtagccactcgtacgctacagcccaagcgctagagcccaagaggccggaggtggaaggcgtcgcggcactatagccactcgccgcaagagcccaagagaccggagctggaaggatgagggtctgggtgttcacgaattgcctggaggcaggaggctcgtcgtccggagccacaggcgtggagacgtccgggataaggtgagcagccgctgcgataggggcgcgtgtgaaccccgtcgcgccccacggatggtataagaataaaggcattccgcgtgcaggatc

SEQ ID NO: 12586 - DNA, 1832 bp, Oryza sativa
cctctgttttgtttttcaccctcaatatttggaaacatttatctaggttgtttgtgtccaggcctataaatcatacatgatgttgtcgtattggatgtgaatgtggtggcgtgttcagtgccttggatttgagtttgatgagagttgcttctgggtcaccactcaccattatcgatgctcctcttcagcataaggtaaaagtcttccctgtttacgttattttacccactatggttgcttgggttggttttttcctgattgcttatgccatggaaagtcatttgatatgttgaacttgaattaactgtagaattgtatacatgttccatttgtgttgtacttccttcttttctattagtagcctcagatgagtgtgaaaaaaacagattatataacttgccctataaatcatttgaaaaaaatattgtacagtgagaaattgatatatagtgaatttttaagagcatgttttcctaaagaagtatatattttctatgtacaaaggccattgaagtaattgtagatacaggataatgtagactttttggacttacactgctacctttaagtaacaatcatgagcaatagtgttgcaatgatatttaggctgcattcgtttactctcttgatttccatgagcacgcttcccaaactgttaaactctgtgttttttgccaaaaaaaaatgtataggaaagttgcttttaaaaaatcatatcaatccattttttaagttatagctaatacttaattaatcatgcgctaataagtcactctgtttttcgtactagagagattgttttgaaccagcactcaagaacacagccttaacccagccaaataatgctacaacctaccagtccacacctcttgtaaagcatttgttgcatggaaaagctaagatgacagcaacctgttcaggaaaacaactgacaaggtcatagggagagggagcttttggaaaggtgccgtgcagttcaaacaattagttagcagtagggtgttggtttttgctcacagcaataagaagttaatcatggtgtaggcaacccaaataaaacaccaaaatatgcacaaggcagtttgttgtattctgtagtacagacaaaactaaaagtaatgaaagaagatgtggtgttagaaaaggaaacaatatcatgagtaatgtgtgagcattatgggaccacgaaataaaaagaacattttgatgagtcgtgtatcctcgatgagcctcaaaagttctctcaccccggataagaaacccttaagcaatgtgcaaagtttgcattctccactgacataatgcaaaataagatatcatcgatgacatagcaactcatgcatcatatcatgcctctctcaacctattcattcctactcatctacataagtatcttcagctaaatgttagaacataaacccataagtcacgtttgatgagtattaggcgtgacacatgacaaatcacagactcaagcaagataaagcaaaatgatgtgtacataaaactccagagctatatgtcatattgcaaaaagaggagagcttataagacaaggcatgactcacaaaaattcatttgcctttcgtgtcaaaaagaggagggctttacattatccatgtcatattgcaaaagaaagagagaaagaacaacacaatgctgcgtcaattatacatatctgtatgtccatcattattcatccacctttcgtgtaccacacttcatatatcatgagtcacttcatgtctggacattaacaaactctatcttaacatttagatgcaagagcctttatctcactataaatgcacgatgatttctcattgtttctc

SEQ ID NO: 12587 - DNA, 786 bp, Zea mays
gacatggaggtggaaggcctgacgtagatagagaagatgctcttagctttcattgtctttcttttgtagtcatctgatttacctctctcgtttatacaactggttttttaaacactccttaacttttcaaattgtctctttctttaccctagactagataattttaatggtgattttgctaatgtggcgccatgttagatagaggtaaaatgaactagttaaaagctcagagtgataaatcaggctctcaaaaattcataaactgttttttaaatatccaaatatttttacatggaaaataataaaatttagtttagtattaaaaaattcagttgaatatagttttgtcttcaaaaattatgaaactgatcttaattatttttccttaaaaccgtgctctatctttgatgtctagtttgagacgattatataattttttttgtgcttaactacgacgagctgaagtacgtagaaatactagtggagtcgtgccgcgtgtgcctgtagccactcgtacgctacagcccaagcgctagagcccaagaggccggaggtggaaggcgtcgcggcactatagccactcgccgcaagagcccaagagaccggagctggaaggatgagggtctgggtgttcacgaattgcctggaggcaggaggctcgtcgtccggagccacaggcgtggagacgtccgggataaggtgagcagccgctgcgataggggcgcgtgtgaaccccgtcgcgccccacggatggtataagaataaaggcattccgcgtgcaggatt

SEQ ID NO: 12588 - DNA, 165 bp, Zea mays
cacccgttcgcctctcaccttttcgctgtactcactcgccacacacaccccctctccagctccgttggagctccggacagcagcaggcgcggggcggtcacgtagtaagcagctctcggctccctctccccttgctccatatgatcgtcgaacccatcgagctac

SEQ ID NO: 12589 - DNA, 1039 bp, Zea mays
gtcccgcgtcaatattattaaaaaactcctacatttctttataatcaacccgcactcttataatctcttctctactactataataagagagtttatgtacaaaataaggtgaaattatgtataagtgttctggatattggttgttggctccatattcacacaacctaatcaatagaaaacatatgttttattaaaacaaaatttatcatatatcatatatatatatatacatatatatatatatatataaaccgtagcaatgcacgggcatataactagtgcaacttaatacatgtgtgtattaagatgaataagagggtatccaaataaaaaacttgttcgcttacgtctggatcgaaaggggttggaaacgattaaatctcttcctagtcaaaattgaatagaaggagatttaatctctcccaatccccttcgatcatccaggtgcaaccgtataagtcctaaagtggtgaggaacacgaaacaaccatgcattggcatgtaaagctccaagaatttgttgtatccttaacaactcacagaacatcaaccaaaattgcacgtcaagggtattgggtaagaaacaatcaaacaaatcctctctgtgtgcaaagaaacacggtgagtcatgccgagatcatactcatctgatatacatgcttacagctcacaagacattacaaacaactcatattgcattacaaagatcgtttcatgaaaaataaaataggccggacaggacaaaaatccttgacgtgtaaagtaaatttacaacaaaaaaaaagccatatgtcaagctaaatctaattcgttttacgtagatcaacaacctgtagaaggcaacaaaactgagccacgcagaagtacagaatgattccagatgaaccatcgacgtgctacgtaaagagagtgacgagtcatatacatttggcaagaaaccatgaagctgcctacagccgtctcggtggcataagaacacaagaaattgtgttaattaatcaaagctataaataacgctcgcatgcctgtgcacttctcc

SEQ ID NO: 12590 - DNA, 613 bp, Cauliflower mosaic virus
ggtccgatgtgagacttttcaacaaagggtaatatccggaaacctcctcggattccattgcccagctatctgtcactttattgtgaagatagtggaaaaggaaggtggctcctacaaatgccatcattgcgataaaggaaaggccatcgttgaagatgcctctgccgacagtggtcccaaagatggacccccacccacgaggagcatcgtggaaaaagaagacgttccaaccacgtcttcaaagcaagtggattgatgtgatggtccgattgagacttttcaacaaagggtaatatccggaaacctcctcggattccattgcccagctatctgtcactttattgtgaagatagtggaaaaggaaggtggctcctacaaatgccatcattgcgataaaggaaaggccatcgttgaagatgcctctgccgacagtggtcccaaagatggacccccacccacgaggagcatcgtggaaaaagaagacgttccaaccacgtcttcaaagcaagtggattgatgtgatatctccactgacgtaagggatgacgcacaatcccactatccttcgcaagacccttcctctatataaggaagttcatttcatttggagagg

SEQ ID NO: 12591 - DNA, 469 bp, Zea mays
ggtactcctgagatactataccctcctgttttaaaatagttggcattatcgaattatcattttactttttaatgttttctcttcttttaatatattttatgaattttaatgtattttaaaatgttatgcagttcgctctggacttttctgctgcgcctacacttgggtgtactgggcctaaattcagcctgaccgaccgcctgcattgaataatggatgagcaccggtaaaatccgcgtacccaactttcgagaagaaccgagacgtggcgggccgggccaccgacgcacggcaccagcgactgcacacgtcccgccggcgtacgtgtacgtgctgttccctcactggccgcccaatccactcatgcatgcccacgtacacccctgccgtggcgcgcccagatcctaatcctttcgccgttctgcacttctgctgcctataaatggcggcatcgaccgtcacctgcttc

SEQ ID NO: 12592 - DNA, 80 bp, Oryza sativa
accaccaccaccaccaccacctccacctcctcccccctcgctgccggacgacgagctcctcccccctccccctccgccgc

SEQ ID NO: 12593 - DNA, 65 bp, Hordeum vulgare subsp. vulgare
catccatcgagagacgttcgcagcagcaaagagcacgcagcaactagctttcagttgtttcaacc

SEQ ID NO: 12594 - DNA, 13 bp, Glycine max
atcatcaagaacc

SEQ ID NO: 12595 - DNA, 151 bp, Zea mays
attctatatataccctcagtccctgttccagttctcgttaagctagcagcaccaagttgtcgaacacttgcctgctcttgagctcgatcaagctatcatcagctgcgtcttgcgcacagcaacagcttcccaactgcaaccgtagcagcca

SEQ ID NO: 12596 - DNA, 477 bp, Oryza sativa
cgccgcgccggtaaccaccccgcccctctcctctttctttctccgttttttttttccgtctcggtctcgatctttggccttggtagtttgggtgggcgagaggcggcttcgtgcgcgcccagatcggtgcgcgggaggggcgggatctcgcggctggggctctcgccggcgtggatccggcccggatctcgcggggaatggggctctcggatgtagatctgcgatccgccgttgttgggggagatgatggggggtttaaaatttccgccatgctaaacaagatcaggaagaggggaaaagggcactatggtttatatttttatatatttctgctgcttcgtcaggcttagatgtgctagatctttctttcttctttttgtgggtagaatttgaatccctcagcattgttcatcggtagtttttcttttcatgatttgtgacaaatgcagcctcgtgcggagcttttttgtaggtaga

SEQ ID NO: 12597 - DNA, 804 bp, Zea mays
accgtcttcggtacgcgctcactccgccctctgcctttgttactgccacgtttctctgaatgctctcttgtgtggtgattgctgagagtggtttagctggatctagaattacactctgaaatcgtgttctgcctgtgctgattacttgccgtcctttgtagcagcaaaatatagggacatggtagtacgaaacgaagatagaacctacacagcaatacgagaaatgtgtaatttggtgcttagcggtatttatttaagcacatgttggtgttatagggcacttggattcagaagtttgctgttaatttaggcacaggcttcatactacatgggtcaatagtatagggattcatattataggcgatactataataatttgttcgtctgcagagcttattatttgccaaaattagatattcctattctgtttttgtttgtgtgctgttaaattgttaacgcctgaaggaataaatataaatgacgaaattttgatgtttatctctgctcctttattgtgaccataagtcaagatcagatgcacttgttttaaatattgttgtctgaagaaataagtactgacagtattttgatgcattgatctgcttgtttgttgtaacaaaatttaaaaataaagagtttcctttttgttgctctccttacctcctgatggtatctagtatctaccaactgacactatattgcttctctttacatacgtatcttgctcgatgccttctccctagtgttgaccagtgttactcacatagtctttgctcatttcattgtaatgcagataccaagcgg

SEQ ID NO: 12598 - DNA, 943 bp, Solanum tuberosum
accctgcaatgtgaccctagacttgtccatcttctggattggccaacttaattaatgtatgaaataaaaggatgcacacatagtgacatgctaatcactataatgtgggcatcaaagttgtgtgttatgtgtaattactaattatctgaataagagaaagagatcatccatatttcttatcctaaatgaatgtcacgtgtctttataattctttgatgaaccagatgcattttattaaccaattccatatacatataaatattaatcatatataattaatatcaattgggttagcaaaacaaatctagtctaggtgtgttttgctaattattgggggatagtgcaaaaagaaatctacgttctcaataattcagatagaaaacttaataaagtgagataatttacatagattgcttttatcctttgatatatgtgaaaccatgcatgatataaggaaaatagatagagaaataattttttacatcgttgaatatgtaaacaatttaattcaagaagctaggaatataaatattgaggagtttatgattattattattattttgatgttcaatgaagttttttttaatttcatatgaagtatacaaaaattcttcatagatttttgtttctatgccgtagttatctttaatatatttgtggttgaagaaatttattgctagaaacgaatggattgtcaatttttttttaaagcaaatatatatgaaattatactgtatattattttagtcatgattaaaatgtggccttaattgaatcatctttctcattcattttttcaaaagcatatcaggatgattgatatttatctattttaaaaattaatttaagggttcaaattaaatttaacttaaaagtgtcctaaccgtagttaaaggtttactttaaaaaaatactatgaaaaatctaatcttctatgaatcga

SEQ ID NO: 12599 - DNA, 315 bp, Gossypium hirsutum
tgatcacctgtcgtacagtatttctacatttgatgtgtgatttgtgaagaacatcaaacaaaacaagcactggctttaatatgatgataagtattatggtaattaattaattggcaaaaacaacaatgaagctaaaattttatttattgagccttgcggttaatttcttgtgatgatctttttttttattttctaattatatatagtttcctttgctttgaaatgctaaaggtttgagagagttatgctctttttttcttcctctttcttttttaactttatcatacaaattttgaataaaaatgtgagtacatt

SEQ ID NO: 12600 - DNA, 940 bp, Solanum tuberosum
accctgcaatgtgaccctagacttgtccatcttcggatggccaacttaattaatgtataaataaaaggatgcacacatagtgacatgctaatcactataatgtgggcatcaaagttgtgtgttatgtgtaattactaattatctgaataagagaaagagatcatccatatttcttatcctaaatgaatgtcacgtgtctttataattctttgatgaaccagatgcattttattaaccaattccatatacatataaatattaatcatatataattaatatcaattgggttagcaaaacaaatctagtctaggtgtgttttgctaattattgggggatagtgcaaaaagaaatctacgttctcaataattcagatagaaaacttaataaagtgagataatttacatagattgcttttatcctttgatatatgtgaaaccatgcatgatataaggaaaatagatagagaaataattttttacatcgttgaatatgtaaacaatttaattcaagaagctaggaatataaatattgaggagtttatgattattattattattttgatgttcaatgaagttttttttaatttcatatgaagtatacaaaaattcttcatagatttttgtttctatgccgtagttatctttaatatatttgtggttgaagaaatttattgctagaaacgaatggattgtcaatttttttttaaagcaaatatatatgaaattatactgtatattattttagtcatgattaaaatgtggccttaattgaatcatctttctcattcattttttcaaaagcatatcaggatgattgatatttatctattttaaaaattaatttaagggttcaaattaaatttaacttaaaagtgtcctaaccgtagttaaaggtttactttaaaaaaatactatgaaaaatctaatcttctatgaatcga

SEQ ID NO: 12601 - DNA, 61 bp, Zea mays
atcaccaccactgggtcttcagaccattagctttatctactccagagcgcagaagaacccg

SEQ ID NO: 12602 - DNA, 228 bp, Arabidopsis thaliana
atggcgcaagttagcagaatctgcaatggtgtgcagaacccatctcttatctccaatctctcgaaatccagtcaacgcaaatctcccttatcggtttctctgaagacgcagcagcatccacgagcttatccgatttcgtcgtcgtggggattgaagaagagtgggatgacgttaattggctctgagcttcgtcctcttaaggtcatgtcttctgtttccacggcgtgc

SEQ ID NO: 12603 - DNA, 10289 bp, synthetic DNA
cgcgccttaattaagcggccgcatcgatcgtgaagtttctcatctaagcccccatttggacgtgaatgtagacacgtcgaaataaagatttccgaattagaataatttgtttattgctttcgcctataaatacgacggatcgtaatttgtcgttttatcaaaatgtactttcattttataataacgctgcggacatctacatttttgaattgaaaaaaaattggtaattactctttctttttctccatattgaccatcatactcattgctgatccatgtagatttcccggacatgaagccatttacaattgaatatatcctgccgccgctgccgctttgcacccggtggagcttgcatgttggtttctacgcagaactgagccggttaggcagataatttccattgagaactgagccatgtgcaccttccccccaacacggtgagcgacggggcaacggagtgatccacatgggacttttcctagcttggctgccatttttggggtgaggccgttcgcggccgaggggcgcagcccctggggggatgggaggcccgcgttagcgggccgggagggttcgagaagggggggcaccccccttcggcgtgcgcggtcacgcgcacagggcgcagccctggttaaaaacaaggtttataaatattggtttaaaagcaggttaaaagacaggttagcggtggccgaaaaacgggcggaaacccttgcaaatgctggattttctgcctgtggacagcccctcaaatgtcaataggtgcgcccctcatctgtcagcactctgcccctcaagtgtcaaggatcgcgcccctcatctgtcagtagtcgcgcccctcaagtgtcaataccgcagggcacttatccccaggcttgtccacatcatctgtgggaaactcgcgtaaaatcaggcgttttcgccgatttgcgaggctggccagctccacgtcgccggccgaaatcgagcctgcccctcatctgtcaacgccgcgccgggtgagtcggcccctcaagtgtcaacgtccgcccctcatctgtcagtgagggccaagttttccgcgaggtatccacaacgccggcggccggccgcggtgtctcgcacacggcttcgacggcgtttctggcgcgtttgcagggccatagacggccgccagcccagcggcgagggcaaccagcccggtgagcgtcggaaagggtcgatcgaccgatgcccttgagagccttcaacccagtcagctccttccggtgggcgcggggcatgactatcgtcgccgcacttatgactgtcttctttatcatgcaactcgtaggacaggtgccggcagcgctctgggtcattttcggcgaggaccgctttcgctggagcgcgacgatgatcggcctgtcgcttgcggtattcggaatcttgcacgccctcgctcaagccttcgtcactggtcccgccaccaaacgtttcggcgagaagcaggccattatcgccggcatggcggccgacgcgctgggctacgtcttgctggcgttcgcgacgcgaggctggatggccttccccattatgattcttctcgcttccggcggcatcgggatgcccgcgttgcaggccatgctgtccaggcaggtagatgacgaccatcagggacagcttcaaggatcgctcgcggctcttaccagcctaacttcgatcattggaccgctgatcgtcacggcgatttatgccgcctcggcgagcacatggaacgggttggcatggattgtaggcgccgccctataccttgtctgcctccccgcgttgcgtcgcggtgcatggagccgggccacctcgacctgaatggaagccggcggcacctcgctaacggattcaccactccaagaattggagccaatcaattcttgcggagaactgtgaatgcgcaaaccaacccttggcagaacatatccatcgcgtccgccatctccagcagccgcacgcggcgcatctcgggcagcgttgggtcctggccacgggtgcgcatgatcgtgctcctgtcgttgaggacccggctaggctggcggggttgccttactggttagcagaatgaatcaccgatacgcgagcgaacgtgaagcgactgctgctgcaaaacgtctgcgacctgagcaacaacatgaatggtcttcggtttccgtgtttcgtaaagtctggaaacgcggaagtcagcgccctgcaccattatgttccggatctgcatcgcaggatgctgctggctaccctgtggaacacctacatctgtattaacgaagcgctggcattgaccctgagtgatttttctctggtcccgccgcatccataccgccagttgtttaccctcacaacgttccagtaaccgggcatgttcatcatcagtaacccgtatcgtgagcatcctctctcgtttcatcggtatcattacccccatgaacagaaatcccccttacacggaggcatcagtgaccaaacaggaaaaaaccgcccttaacatggcccgctttatcagaagccagacattaacgcttctggagaaactcaacgagctggacgcggatgaacaggcagacatctgtgaatcgcttcacgaccacgctgatgagctttaccgcagctgcctcgcgcgtttcggtgatgacggtgaaaacctctgacacatgcagctcccggagacggtcacagcttgtctgtaagcggatgccgggagcagacaagcccgtcagggcgcgtcagcgggtgttggcgggtgtcggggcgcagccatgacccagtcacgtagcgatagcggagtgtatactggcttaactatgcggcatcagagcagattgtactgagagtgcaccatatgcggtgtgaaataccgcacagatgcgtaaggagaaaataccgcatcaggcgctcttccgcttcctcgctcactgactcgctgcgctcggtcgttcggctgcggcgagcggtatcagctcactcaaaggcggtaatacggttatccacagaatcaggggataacgcaggaaagaacatgtgagcaaaaggccagcaaaaggccaggaaccgtaaaaaggccgcgttgctggcgtttttccataggctccgcccccctgacgagcatcacaaaaatcgacgctcaagtcagaggtggcgaaacccgacaggactataaagataccaggcgtttccccctggaagctccctcgtgcgctctcctgttccgaccctgccgcttaccggatacctgtccgcctttctcccttcgggaagcgtggcgctttctcatagctcacgctgtaggtatctcagttcggtgtaggtcgttcgctccaagctgggctgtgtgcacgaaccccccgttcagcccgaccgctgcgccttatccggtaactatcgtcttgagtccaacccggtaagacacgacttatcgccactggcagcagccactggtaacaggattagcagagcgaggtatgtaggcggtgctacagagttcttgaagtggtggcctaactacggctacactagaaggacagtatttggtatctgcgctctgctgaagccagttaccttcggaaaaagagttggtagctcttgatccggcaaacaaaccaccgctggtagcggtggtttttttgtttgcaagcagcagattacgcgcagaaaaaaaggatctcaagaagatcctttgatcttttctacggggtctgacgctcagtggaacgaaaactcacgttaagggattttggtcatgagattatcaaaaaggatcttcacctagatccttttaaattaaaaatgaagttttaaatcaatctaaagtatatatgagtaaacttggtctgacagttaccaatgcttaatcagtgaggcacctatctcagcgatctgtctatttcgttcatccatagttgcctgactccccgtcgtgtagataactacgatacgggagggcttaccatctggccccagtgctgcaatgataccgcgagacccacgctcaccggctccagatttatcagcaataaaccagccagccggaagggccgagcgcagaagtggtcctgcaactttatccgcctccatccagtctattaattgttgccgggaagctagagtaagtagttcgccagttaatagtttgcgcaacgttgttgccattgctgcaggtcgggagcacaggatgacgcctaacaattcattcaagccgacaccgcttcgcggcgcggcttaattcaggagttaaacatcatgagggaagcggtgatcgccgaagtatcgactcaactatcagaggtagttggcgtcatcgagcgccatctcgaaccgacgttgctggccgtacatttgtacggctccgcagtggatggcggcctgaagccacacagtgatattgatttgctggttacggtgaccgtaaggcttgatgaaacaacgcggcgagctttgatcaacgaccttttggaaacttcggcttcccctggagagagcgagattctccgcgctgtagaagtcaccattgttgtgcacgacgacatcattccgtggcgttatccagctaagcgcgaactgcaatttggagaatggcagcgcaatgacattcttgcaggtatcttcgagccagccacgatcgacattgatctggctatcttgctgacaaaagcaagagaacatagcgttgccttggtaggtccagcggcggaggaactctttgatccggttcctgaacaggatctatttgaggcgctaaatgaaaccttaacgctatggaactcgccgcccgactgggctggcgatgagcgaaatgtagtgcttacgttgtcccgcatttggtacagcgcagtaaccggcaaaatcgcgccgaaggatgtcgctgccgactgggcaatggagcgcctgccggcccagtatcagcccgtcatacttgaagctaggcaggcttatcttggacaagaagatcgcttggcctcgcgcgcagatcagttggaagaatttgttcactacgtgaaaggcgagatcaccaaggtagtcggcaaataatgtctaacaattcgttcaagccgacgccgcttcgcggcgcggcttaactcaagcgttagatgctgcaggcatcgtggtgtcacgctcgtcgtttggtatggcttcattcagctccggttcccaacgatcaaggcgagttacatgatcccccatgttgtgcaaaaaagcggttagctccttcggtcctccgatcgaggatttttcggcgctgcgctacgtccgcgaccgcgttgagggatcaagccacagcagcccactcgaccttctagccgacccagacgagccaagggatctttttggaatgctgctccgtcgtcaggctttccgacgtttgggtggttgaacagaagtcattatcgcacggaatgccaagcactcccgaggggaaccctgtggttggcatgcacatacaaatggacgaacggataaaccttttcacgcccttttaaatatccgattattctaataaacgctcttttctcttaggtttacccgccaatatatcctgtcaaacactgatagtttaaactgaaggcgggaaacgacaatctggcgcgcctgcggccgcctcgaggtcattcatatgcttgagaagagagtcgggatagtccaaaataaaacaaaggtaagattacctggtcaaaagtgaaaacatcagttaaaaggtggtataaagtaaaatatcggtaataaaaggtggcccaaagtgaaatttactcttttctactattataaaaattgaggatgtttttgtcggtactttgatacgtcatttttgtatgaattggtttttaagtttattcgcttttggaaatgcatatctgtatttgagtcgggttttaagttcgtttgcttttgtaaatacagagggatttgtataagaaatatctttaaaaaaacccatatgctaatttgacataatttttgagaaaaatatatattcaggcgaattctcacaatgaacaataataagattaaaatagctttcccccgttgcagcgcatgggtattttttctagtaaaaataaaagataaacttagactcaaaacatttacaaaaacaacccctaaagttcctaaagcccaaagtgctatccacgatccatagcaagcccagcccaacccaacccaacccaacccaccccagtccagccaactggacaatagtctccacacccccccactatcaccgtgagttgtccgcacgcaccgcacgtctcgcagccaaaaaaaaaaaaagaaagaaaaaaaagaaaaagaaaaaacagcaggtgggtccgggtcgtgggggccggaaacgcgaggaggatcgcgagccagcgacgaggccggccctccctccgcttccaaagaaacgccccccatcgccactatatacatacccccccctctcctcccatccccccaaccctaccaccaccaccaccaccacctccacctcctcccccctcgctgccggacgacgagctcctcccccctccccctccgccgccgccgcgccggtaaccaccccgcccctctcctctttctttctccgttttttttttccgtctcggtctcgatctttggccttggtagtttgggtgggcgagaggcggcttcgtgcgcgcccagatcggtgcgcgggaggggcgggatctcgcggctggggctctcgccggcgtggatccggcccggatctcgcggggaatggggctctcggatgtagatctgcgatccgccgttgttgggggagatgatggggggtttaaaatttccgccatgctaaacaagatcaggaagaggggaaaagggcactatggtttatatttttatatatttctgctgcttcgtcaggcttagatgtgctagatctttctttcttctttttgtgggtagaatttgaatccctcagcattgttcatcggtagtttttcttttcatgatttgtgacaaatgcagcctcgtgcggagcttttttgtaggtagaccgcggaccggtcgcgcctcagcagtcgctgtcgttaacccagcggtactcgctgaggcgatcgcgggcccggtaccctgcaatgtgaccctagacttgtccatcttctggattggccaacttaattaatgtatgaaataaaaggatgcacacatagtgacatgctaatcactataatgtgggcatcaaagttgtgtgttatgtgtaattactaattatctgaataagagaaagagatcatccatatttcttatcctaaatgaatgtcacgtgtctttataattctttgatgaaccagatgcattttattaaccaattccatatacatataaatattaatcatatataattaatatcaattgggttagcaaaacaaatctagtctaggtgtgttttgctaattattgggggatagtgcaaaaagaaatctacgttctcaataattcagatagaaaacttaataaagtgagataatttacatagattgcttttatcctttgatatatgtgaaaccatgcatgatataaggaaaatagatagagaaataattttttacatcgttgaatatgtaaacaatttaattcaagaagctaggaatataaatattgaggagtttatgattattattattattttgatgttcaatgaagttttttttaatttcatatgaagtatacaaaaattcttcatagatttttgtttctatgccgtagttatctttaatatatttgtggttgaagaaatttattgctagaaacgaatggattgtcaatttttttttaaagcaaatatatatgaaattatactgtatattattttagtcatgattaaaatgtggccttaattgaatcatctttctcattcattttttcaaaagcatatcaggatgattgatatttatctattttaaaaattaatttaagggttcaaattaaatttaacttaaaagtgtcctaaccgtagttaaaggtttactttaaaaaaatactatgaaaaatctaatcttctatgaatcgacctgcaggatttaaatccatcgttctggggcctaacgggccaagctttccgatcctacctgtcacttcatcaaaaggacagtagaaaaggaaggtggcacctacaaatgccatcattgcgataaaggaaaggctatcattcaagatgcctctgccgacagtggtcccaaagatggacccccacccacgaggagcatcgtggaaaaagaagacgttccaaccacgtcttcaaagcaagtggattgatgtgatacttccactgacgtaagggatgacgcacaatcccactatccttcgcaagacccttcctctatataaggaagttcatttcatttggagaggacacgctgaaatcaccagtctctctctacaagatcggggatctctagctagacgatcgtttcgcatgattgaacaagatggattgcacgcaggttctccggccgcttgggtggagaggctattcggctatgactgggcacaacagacaatcggctgctctgatgccgccgtgttccggctgtcagcgcaggggcgcccggttctttttgtcaagaccgacctgtccggtgccctgaatgaactgcaggacgaggcagcgcggctatcgtggctggccacgacgggcgttccttgcgcagctgtgctcgacgttgtcactgaagcgggaagggactggctgctattgggcgaagtgccggggcaggatctcctgtcatctcaccttgctcctgccgagaaagtatccatcatggctgatgcaatgcggcggctgcatacgcttgatccggctacctgcccattcgaccaccaagcgaaacatcgcatcgagcgagcacgtactcggatggaagccggtcttgtcgatcaggatgatctggacgaagagcatcaggggctcgcgccagccgaactgttcgccaggctcaaggcgcgcatgcccgacggcgaggatctcgtcgtgacccatggcgatgcctgcttgccgaatatcatggtggaaaatggccgcttttctggattcatcgactgtggccggctgggtgtggcggaccgctatcaggacatagcgttggctacccgtgatattgctgaagagcttggcggcgaatgggctgaccgcttcctcgtgctttacggtatcgccgctcccgattcgcagcgcatcgccttctatcgccttcttgacgagttcttctgagcgggactctggggttcgaagaattcccgatcgttcaaacatttggcaataaagtttcttaagattgaatcctgttgccggtcttgcgatgattatcatataatttctgttgaattacgttaagcatgtaataattaacatgtaatgcatgacgttatttatgagatgggtttttatgattagagtcccgcaattatacatttaatacgcgatagaaaacaaaatatagcgcgcaaactaggataaattatcgcgcgcggtgtcatctatgttactagatcggggatatcgcgtgtctttataattctttgatgaaccagatgcattttattaaccaattccatatacatataaatattaatcatatataattaatatcaattgggttagcaaaacaaatctagtctaggtgtgttttgctaattattgggggatagtgcaaaaagaaatctacgttctcaataattcagatagaaaacttaataaagtgagataatttacatagattgcttttatcctttgatatatgtgaaaccatgcatgatataaggaaaatagatagagaaataattttttacatcgttgaatatgtaaacaatttaattcaagaagctaggaatataaatattgaggagtttatgattattattattattttgatgttcaatgaagttttttttaatttcatatgaagtatacaaaaattcttcatagatttttgtttctatgccgtagttatctttaatatatttgtggttgaagaaatttattgctagaaacgaatggattgtcaatttttttttaaagcaaatatatatgaaattatactgtatattattttagtcatgattaaaatgtggccttaattgaatcatctttctcattcattttttcaaaagcatatcaggatgattgatatttatctattttaaaaattaatttaagggttcaaattaaatttaacttaaaagtgtcctaaccgtagttaaaggtttactttaaaaaaatactatgaaaaatctaatcttctatgaatcgaccgctgatcgatcgcggccgctgg

SEQ ID NO: 12604 - DNA, 9769 bp, synthetic DNA
ggtccgatgtgagacttttcaacaaagggtaatatccggaaacctcctcggattccattgcccagctatctgtcactttattgtgaagatagtggaaaaggaaggtggctcctacaaatgccatcattgcgataaaggaaaggccatcgttgaagatgcctctgccgacagtggtcccaaagatggacccccacccacgaggagcatcgtggaaaaagaagacgttccaaccacgtcttcaaagcaagtggattgatgtgatggtccgattgagacttttcaacaaagggtaatatccggaaacctcctcggattccattgcccagctatctgtcactttattgtgaagatagtggaaaaggaaggtggctcctacaaatgccatcattgcgataaaggaaaggccatcgttgaagatgcctctgccgacagtggtcccaaagatggacccccacccacgaggagcatcgtggaaaaagaagacgttccaaccacgtcttcaaagcaagtggattgatgtgatatctccactgacgtaagggatgacgcacaatcccactatccttcgcaagacccttcctctatataaggaagttcatttcatttggagaggaccaggtggtaccggcgcgcctcagcagtcgctgtcgttaacccagcggtactcgctgaggcgatcgcgggccctgatcacctgtcgtacagtatttctacatttgatgtgtgatttgtgaagaacatcaaacaaaacaagcactggctttaatatgatgataagtattatggtaattaattaattggcaaaaacaacaatgaagctaaaattttatttattgagccttgcggttaatttcttgtgatgatctttttttttattttctaattatatatagtttcctttgctttgaaatgctaaaggtttgagagagttatgctctttttttcttcctctttcttttttaactttatcatacaaattttgaataaaaatgtgagtacattgagctcatttaaataagcttgatggggatcagattgtcgtttcccgccttcagtttaaactatcagtgtttgacaggatatattggcgggtaaacctaagagaaaagagcgtttattagaataatcggatatttaaaagggcgtgaaaaggtttatccgttcgtccatttgtatgtgcatgccaaccacagggttcccctcgggagtgcttggcattccgtgcgataatgacttctgttcaaccacccaaacgtcggaaagcctgacgacggagcagcattccaaaaagatcccttggctcgtctgggtcggctagaaggtcgagtgggctgctgtggcttgatccctcaacgcggtcgcggacgtagcgcagcgccgaaaaatcctcgatcggaggaccgaaggagctaaccgcttttttgcacaacatgggggatcatgtaactcgccttgatcgttgggaaccggagctgaatgaagccataccaaacgacgagcgtgacaccacgatgcctgcagcatctaacgcttgagttaagccgcgccgcgaagcggcgtcggcttgaacgaattgttagacattatttgccgactaccttggtgatctcgcctttcacgtagtgaacaaattcttccaactgatctgcgcgcgaggccaagcgatcttcttgtccaagataagcctgcctagcttcaagtatgacgggctgatactgggccggcaggcgctccattgcccagtcggcagcgacatccttcggcgcgattttgccggttactgcgctgtaccaaatgcgggacaacgtaagcactacatttcgctcatcgccagcccagtcgggcggcgagttccatagcgttaaggtttcatttagcgcctcaaatagatcctgttcaggaaccggatcaaagagttcctccgccgctggacctaccaaggcaacgctatgttctcttgcttttgtcagcaagatagccagatcaatgtcgatcgtggctggctcgaagatacctgcaagaatgtcattgcgctgccattctccaaattgcagttcgcgcttagctggataacgccacggaatgatgtcgtcgtgcacaacaatggtgacttctacagcgcggagaatctcgctctctccaggggaagccgaagtttccaaaaggtcgttgatcaaagctcgccgcgttgtttcatcaagccttacggtcaccgtaaccagcaaatcaatatcactgtgtggcttcaggccgccatccactgcggagccgtacaaatgtacggccagcaacgtcggttcgagatggcgctcgatgacgccaactacctctgatagttgagtcgatacttcggcgatcaccgcttccctcatgatgtttaactcctgaattaagccgcgccgcgaagcggtgtcggcttgaatgaattgttaggcgtcatcctgtgctcccgacctgcagcaatggcaacaacgttgcgcaaactattaactggcgaactacttactctagcttcccggcaacaattaatagactggatggaggcggataaagttgcaggaccacttctgcgctcggcccttccggctggctggtttattgctgataaatctggagccggtgagcgtgggtctcgcggtatcattgcagcactggggccagatggtaagccctcccgtatcgtagttatctacacgacggggagtcaggcaactatggatgaacgaaatagacagatcgctgagataggtgcctcactgattaagcattggtaactgtcagaccaagtttactcatatatactttagattgatttaaaacttcatttttaatttaaaaggatctaggtgaagatcctttttgataatctcatgaccaaaatcccttaacgtgagttttcgttccactgagcgtcagaccccgtagaaaagatcaaaggatcttcttgagatcctttttttctgcgcgtaatctgctgcttgcaaacaaaaaaaccaccgctaccagcggtggtttgtttgccggatcaagagctaccaactctttttccgaaggtaactggcttcagcagagcgcagataccaaatactgtccttctagtgtagccgtagttaggccaccacttcaagaactctgtagcaccgcctacatacctcgctctgctaatcctgttaccagtggctgctgccagtggcgataagtcgtgtcttaccgggttggactcaagacgatagttaccggataaggcgcagcggtcgggctgaacggggggttcgtgcacacagcccagcttggagcgaacgacctacaccgaactgagatacctacagcgtgagctatgagaaagcgccacgcttcccgaagggagaaaggcggacaggtatccggtaagcggcagggtcggaacaggagagcgcacgagggagcttccagggggaaacgcctggtatctttatagtcctgtcgggtttcgccacctctgacttgagcgtcgatttttgtgatgctcgtcaggggggcggagcctatggaaaaacgccagcaacgcggcctttttacggttcctggccttttgctggccttttgctcacatgttctttcctgcgttatcccctgattctgtggataaccgtattaccgcctttgagtgagctgataccgctcgccgcagccgaacgaccgagcgcagcgagtcagtgagcgaggaagcggaagagcgcctgatgcggtattttctccttacgcatctgtgcggtatttcacaccgcatatggtgcactctcagtacaatctgctctgatgccgcatagttaagccagtatacactccgctatcgctacgtgactgggtcatggctgcgccccgacacccgccaacacccgctgacgcgccctgacgggcttgtctgctcccggcatccgcttacagacaagctgtgaccgtctccgggagctgcatgtgtcagaggttttcaccgtcatcaccgaaacgcgcgaggcagctgcggtaaagctcatcagcgtggtcgtgaagcgattcacagatgtctgcctgttcatccgcgtccagctcgttgagtttctccagaagcgttaatgtctggcttctgataaagcgggccatgttaagggcggttttttcctgtttggtcactgatgcctccgtgtaagggggatttctgttcatgggggtaatgataccgatgaaacgagagaggatgctcacgatacgggttactgatgatgaacatgcccggttactggaacgttgtgagggtaaacaactggcggtatggatgcggcgggaccagagaaaaatcactcagggtcaatgccagcgcttcgttaatacagatgtaggtgttccacagggtagccagcagcatcctgcgatgcagatccggaacataatggtgcagggcgctgacttccgcgtttccagactttacgaaacacggaaaccgaagaccattcatgttgttgctcaggtcgcagacgttttgcagcagcagtcgcttcacgttcgctcgcgtatcggtgattcattctgctaaccagtaaggcaaccccgccagcctagccgggtcctcaacgacaggagcacgatcatgcgcacccgtggccaggacccaacgctgcccgagatgcgccgcgtgcggctgctggagatggcggacgcgatggatatgttctgccaagggttggtttgcgcattcacagttctccgcaagaattgattggctccaattcttggagtggtgaatccgttagcgaggtgccgccggcttccattcaggtcgaggtggcccggctccatgcaccgcgacgcaacgcggggaggcagacaaggtatagggcggcgcctacaatccatgccaacccgttccatgtgctcgccgaggcggcataaatcgccgtgacgatcagcggtccaatgatcgaagttaggctggtaagagccgcgagcgatccttgaagctgtccctgatggtcgtcatctacctgcctggacagcatggcctgcaacgcgggcatcccgatgccgccggaagcgagaagaatcataatggggaaggccatccagcctcgcgtcgcgaacgccagcaagacgtagcccagcgcgtcggccgccatgccggcgataatggcctgcttctcgccgaaacgtttggtggcgggaccagtgacgaaggcttgagcgagggcgtgcaagattccgaataccgcaagcgacaggccgatcatcgtcgcgctccagcgaaagcggtcctcgccgaaaatgacccagagcgctgccggcacctgtcctacgagttgcatgataaagaagacagtcataagtgcggcgacgatagtcatgccccgcgcccaccggaaggagctgactgggttgaaggctctcaagggcatcggtcgatcgaccctttccgacgctcaccgggctggttgccctcgccgctgggctggcggccgtctatggccctgcaaacgcgccagaaacgccgtcgaagccgtgtgcgagacaccgcggccggccgccggcgttgtggatacctcgcggaaaacttggccctcactgacagatgaggggcggacgttgacacttgaggggccgactcacccggcgcggcgttgacagatgaggggcaggctcgatttcggccggcgacgtggagctggccagcctcgcaaatcggcgaaaacgcctgattttacgcgagtttcccacagatgatgtggacaagcctggggataagtgccctgcggtattgacacttgaggggcgcgactactgacagatgaggggcgcgatccttgacacttgaggggcagagtgctgacagatgaggggcgcacctattgacatttgaggggctgtccacaggcagaaaatccagcatttgcaagggtttccgcccgtttttcggccaccgctaacctgtcttttaacctgcttttaaaccaatatttataaaccttgtttttaaccagggctgcgccctgtgcgcgtgaccgcgcacgccgaaggggggtgcccccccttctcgaaccctcccggcccgctaacgcgggcctcccatccccccaggggctgcgcccctcggccgcgaacggcctcaccccaaaaatggcagccaagctaggaaaagtcccatgtggatcactccgttgccccgtcgctcaccgtgttggggggaaggtgcacatggctcagttctcaatggaaattatctgcctaaccggctcagttctgcgtagaaaccaacatgcaagctccaccgggtgcaaagcggcagcggcggcaggatatattcaattgtaaatggcttcatgtccgggaaatctacatggatcagcaatgagtatgatggtcaatatggagaaaaagaaagagtaattaccaattttttttcaattcaaaaatgtagatgtccgcagcgttattataaaatgaaagtacattttgataaaacgacaaattacgatccgtcgtatttataggcgaaagcaataaacaaattattctaattcggaaatctttatttcgacgtgtctacattcacgtccaaatgggggcttagatgagaaacttcacgatcgatgcggccaccactcgagaagcttactagtcaacaattggccaatctttgttctaaattgctaataaacgaccatttccgtcaattctccttggttgcaacagtctacccgtcaaatgtttactaatttataagtgtgaagtttgaattatgaaagacgaaatcgtattaaaaattcacaagaataaacaactccatagattttcaaaaaaacagtcacgagaaaaaaaccacagtccgtttgtctgctcttctagtttttattatttttctattaatagttttttgttatttcgagaataaaatttgaacgatgtccgaaccacaaaagccgagccgataaatcctaagccgagcctaactttagccgtaaccatcagtcacggctcccgggctaattcatttgaaccgaatcataatcaacggtttagatcaaactcaaaacaatctaacggcaacatagacgcgtcggtgagctaaaaagagtgtgaaagccaggtcaccatagcattgtctctcccagattttttatttgggaaataatagaagaaatagaaaaaaataaaagagtgagaaaaatcgtagagctatatattcgcacatgtactcgtttcgctttccttagtgttagctgctgccgctgttgtttctcctccatttctctatctttctctctcgctgcttctcgaatcttctgtatcatcttcttcttcttcaaggtgagtctctagatccgttcgcttgattttgctgctcgttagtcgttattgttgattctctatgccgatttcgctagatctgtttagcatgcgttgtggttttatgagaaaatctttgttttgggggttgcttgttatgtgattcgatccgtgcttgttggatcgatctgagttaattcttaaggtttatgtgttagatctatggagtttgaggattcttctcgcttctgtcgatctctcgctgttatttttgtttttttcagtgaagtgaagttgtttagttcgaaatgacttcgtgtatgctcgattgatctggttttaatcttcgatctgttaggtgttgatgtttacaagtgaattctagtgttttctcgttgagatctgtgaagtttgaacctagttttctcaataatcaacatatgaagcgatgtttgagtttcaataaacgctgctaatcttcgaaactaagttgtgatctgattcgtgtttacttcatgagcttatccaattcatttcggtttcattttactttttttttagtgaaccatggcgcaagttagcagaatctgcaatggtgtgcagaacccatctcttatctccaatctctcgaaatccagtcaacgcaaatctcccttatcggtttctctgaagacgcagcagcatccacgagcttatccgatttcgtcgtcgtggggattgaagaagagtgggatgacgttaattggctctgagcttcgtcctcttaaggtcatgtcttctgtttccacggcgtgcatgcttcatggagcttcatctaggccagctactgccaggaagtctagcgggctcagtggcaccgtgcgcatccctggcgataaaagtatttcacacaggagcttcatgttcggaggacttgctagtggagagacgagaatcactggtttgcttgagggcgaagatgttatcaacaccggtaaggcgatgcaagcaatgggtgccagaatccgaaaagagggcgatacgtggatcatcgacggtgttggtaacggaggattgctcgctcccgaagcgccacttgactttgggaacgcagctacggggtgccgtcttactatgggactggtaggcgtgtatgactttgactctaccttcatcggtgacgcgagcctcactaagagaccaatgggacgagtgctgaatcccctgagggagatgggtgtccaggtgaaatctgaggatggtgatcgtcttccggttactctgcgaggccccaagacccccacgccaatcacgtacagggttccgatggcgtcagcacaggtcaagtcagcggtactcctggcgggcctcaacacacctggaatcacaaccgtgattgaacccatcatgactagagaccacacggagaagatgttgcagggtttcggcgctaatctaacggtcgaaaccgacgccgacggcgtgaggacaatccgcttggagggcagaggtaaactgactggccaagtcatcgatgtgcctggagatccctcgtccacagcgtttcccctcgtagctgcgttgctcgtccctggatctgatgtgacgatcctgaatgtcctcatgaatccaactagaaccggcctcatcctcacattgcaggagatgggtgctgacatcgaggttatcaatcctaggttggcaggtggagaggatgtggccgatctgcgcgtgcgttctagtacactcaaaggcgtgaccgtccctgaggatcgcgctccatccatgatcgacgagtaccccattctcgccgttgctgctgcgtttgccgagggcgcaactgtaatgaacggccttgaggagttgagggttaaggagagtgacaggctgtccgcggtggcgaatggcctgaagctaaacggcgtggactgcgacgaaggtgaaacgtcccttgtagtccgtggtcgcccagacgggaaggggttggggaatgcttcgggagctgctgtggcgacgcaccttgatcatagaatcgccatgtcatttctggtgatgggacttgtctccgagaatccggtgaccgttgacgatgctaccatgatcgccacctcctttcctgagttcatggacctcatggcaggcttgggggccaagatcgagctgtctgatactaaggccgcttgaattcccgatcgttcaaacatttggcaataaagtttcttaagattgaatcctgttgccggtcttgcgatgattatcatataatttctgttgaattacgttaagcatgtaataattaacatgtaatgcatgacgttatttatgagatgggtttttatgattagagtcccgcaattatacatttaatacgcgatagaaaacaaaatatagcgcgcaaactaggataaattatcgcgcgcggtgtcatctatgttactagatcggggatcccacgtgcggaccgcctgcaggccgcgttatcaagctaactgca

SEQ ID NO: 12605 - DNA, 8504 bp, Artificial
  PMON99053
gtaccctcagcagtcgctgtgcgatcgccagcggtactcgctgaggtcgacgtagttagttaattcagctttcgttcgtatcatcggtttcgacaacgttcgtcaagttcaatgcatcagtttcattgcgcacacaccagaatcctactgagtttgagtattatggcattgggaaaactgtttttcttgtaccatttgttgtgcttgtaatttactgtgttttttattcggttttcgctatcgaactgtgaaatggaaatggatggagaagagttaatgaatgatatggtccttttgttcattctcaaattaatattatttgttttttctcttatttgttgtgtgttgaatttgaaattataagagatatgcaaacattttgttttgagtaaaaatgtgtcaaatcgtggcctctaatgaccgaagttaatatgaggagtaaaacacttgtagttgtaccattatgcttattcactaggcaacaaatatattttcagacctagaaaagctgcaaatgttactgaatacaagtatgtcctcttgtgttttagacatttatgaactttcctttatgtaattttccagaatccttgtcagattctaatcattgctttataattatagttatactcatggatttgtagttgagtatgaaaatattttttaatgcattttatgacttgccaattgattgacaacgcggccgccactcgagtggaagctagctttccgatcctacctgtcacttcatcaaaaggacagtagaaaaggaaggtggcacctacaaatgccatcattgcgataaaggaaaggctatcattcaagatgcctctgccgacagtggtcccaaagatggacccccacccacgaggagcatcgtggaaaaagaagacgttccaaccacgtcttcaaagcaagtggattgatgtgatacttccactgacgtaagggatgacgcacaatcccactatccttcgcaagacccttcctctatataaggaagttcatttcatttggagaggacacgctgaaatcaccagtctctctctacaagatcggggatctctagctagacgatcgtttcgcatgattgaacaagatggattgcacgcaggttctccggccgcttgggtggagaggctattcggctatgactgggcacaacagacaatcggctgctctgatgccgccgtgttccggctgtcagcgcaggggcgcccggttctttttgtcaagaccgacctgtccggtgccctgaatgaactgcaggacgaggcagcgcggctatcgtggctggccacgacgggcgttccttgcgcagctgtgctcgacgttgtcactgaagcgggaagggactggctgctattgggcgaagtgccggggcaggatctcctgtcatctcaccttgctcctgccgagaaagtatccatcatggctgatgcaatgcggcggctgcatacgcttgatccggctacctgcccattcgaccaccaagcgaaacatcgcatcgagcgagcacgtactcggatggaagccggtcttgtcgatcaggatgatctggacgaagagcatcaggggctcgcgccagccgaactgttcgccaggctcaaggcgcgcatgcccgacggcgaggatctcgtcgtgacccatggcgatgcctgcttgccgaatatcatggtggaaaatggccgcttttctggattcatcgactgtggccggctgggtgtggcggaccgctatcaggacatagcgttggctacccgtgatattgctgaagagcttggcggcgaatgggctgaccgcttcctcgtgctttacggtatcgccgctcccgattcgcagcgcatcgccttctatcgccttcttgacgagttcttctgagcgggactctggggttcgatccccaattcccgatcgttcaaacatttggcaataaagtttcttaagattgaatcctgttgccggtcttgcgatgattatcatataatttctgttgaattacgttaagcatgtaataattaacatgtaatgcatgacgttatttatgagatgggtttttatgattagagtcccgcaattatacatttaatacgcgatagaaaacaaaatatagcgcgcaaactaggataaattatcgcgcgcggtgtcatctatgttactagatcggggatcgggccactcgagtggtggccgcatcgatcgtgaagtttctcatctaagcccccatttggacgtgaatgtagacacgtcgaaataaagatttccgaattagaataatttgtttattgctttcgcctataaatacgacggatcgtaatttgtcgttttatcaaaatgtactttcattttataataacgctgcggacatctacatttttgaattgaaaaaaaattggtaattactctttctttttctccatattgaccatcatactcattgctgatccatgtagatttcccggacatgaagccatttacaattgaatatatcctgccgccgctgccgctttgcacccggtggagcttgcatgttggtttctacgcagaactgagccggttaggcagataatttccattgagaactgagccatgtgcaccttccccccaacacggtgagcgacggggcaacggagtgatccacatgggacttttcctagcttggctgccatttttggggtgaggccgttcgcggccgaggggcgcagcccctggggggatgggaggcccgcgttagcgggccgggagggttcgagaagggggggcaccccccttcggcgtgcgcggtcacgcgcacagggcgcagccctggttaaaaacaaggtttataaatattggtttaaaagcaggttaaaagacaggttagcggtggccgaaaaacgggcggaaacccttgcaaatgctggattttctgcctgtggacagcccctcaaatgtcaataggtgcgcccctcatctgtcagcactctgcccctcaagtgtcaaggatcgcgcccctcatctgtcagtagtcgcgcccctcaagtgtcaataccgcagggcacttatccccaggcttgtccacatcatctgtgggaaactcgcgtaaaatcaggcgttttcgccgatttgcgaggctggccagctccacgtcgccggccgaaatcgagcctgcccctcatctgtcaacgccgcgccgggtgagtcggcccctcaagtgtcaacgtccgcccctcatctgtcagtgagggccaagttttccgcgaggtatccacaacgccggcggccggccgcggtgtctcgcacacggcttcgacggcgtttctggcgcgtttgcagggccatagacggccgccagcccagcggcgagggcaaccagcccggtgagcgtcggaaagggtcgatcgaccgatgcccttgagagccttcaacccagtcagctccttccggtgggcgcggggcatgactatcgtcgccgcacttatgactgtcttctttatcatgcaactcgtaggacaggtgccggcagcgctctgggtcattttcggcgaggaccgctttcgctggagcgcgacgatgatcggcctgtcgcttgcggtattcggaatcttgcacgccctcgctcaagccttcgtcactggtcccgccaccaaacgtttcggcgagaagcaggccattatcgccggcatggcggccgacgcgctgggctacgtcttgctggcgttcgcgacgcgaggctggatggccttccccattatgattcttctcgcttccggcggcatcgggatgcccgcgttgcaggccatgctgtccaggcaggtagatgacgaccatcagggacagcttcaaggatcgctcgcggctcttaccagcctaacttcgatcattggaccgctgatcgtcacggcgatttatgccgcctcggcgagcacatggaacgggttggcatggattgtaggcgccgccctataccttgtctgcctccccgcgttgcgtcgcggtgcatggagccgggccacctcgacctgaatggaagccggcggcacctcgctaacggattcaccactccaagaattggagccaatcaattcttgcggagaactgtgaatgcgcaaaccaacccttggcagaacatatccatcgcgtccgccatctccagcagccgcacgcggcgcatctcgggcagcgttgggtcctggccacgggtgcgcatgatcgtgctcctgtcgttgaggacccggctaggctggcggggttgccttactggttagcagaatgaatcaccgatacgcgagcgaacgtgaagcgactgctgctgcaaaacgtctgcgacctgagcaacaacatgaatggtcttcggtttccgtgtttcgtaaagtctggaaacgcggaagtcagcgccctgcaccattatgttccggatctgcatcgcaggatgctgctggctaccctgtggaacacctacatctgtattaacgaagcgctggcattgaccctgagtgatttttctctggtcccgccgcatccataccgccagttgtttaccctcacaacgttccagtaaccgggcatgttcatcatcagtaacccgtatcgtgagcatcctctctcgtttcatcggtatcattacccccatgaacagaaatcccccttacacggaggcatcagtgaccaaacaggaaaaaaccgcccttaacatggcccgctttatcagaagccagacattaacgcttctggagaaactcaacgagctggacgcggatgaacaggcagacatctgtgaatcgcttcacgaccacgctgatgagctttaccgcagctgcctcgcgcgtttcggtgatgacggtgaaaacctctgacacatgcagctcccggagacggtcacagcttgtctgtaagcggatgccgggagcagacaagcccgtcagggcgcgtcagcgggtgttggcgggtgtcggggcgcagccatgacccagtcacgtagcgatagcggagtgtatactggcttaactatgcggcatcagagcagattgtactgagagtgcaccatatgcggtgtgaaataccgcacagatgcgtaaggagaaaataccgcatcaggcgctcttccgcttcctcgctcactgactcgctgcgctcggtcgttcggctgcggcgagcggtatcagctcactcaaaggcggtaatacggttatccacagaatcaggggataacgcaggaaagaacatgtgagcaaaaggccagcaaaaggccaggaaccgtaaaaaggccgcgttgctggcgtttttccataggctccgcccccctgacgagcatcacaaaaatcgacgctcaagtcagaggtggcgaaacccgacaggactataaagataccaggcgtttccccctggaagctccctcgtgcgctctcctgttccgaccctgccgcttaccggatacctgtccgcctttctcccttcgggaagcgtggcgctttctcatagctcacgctgtaggtatctcagttcggtgtaggtcgttcgctccaagctgggctgtgtgcacgaaccccccgttcagcccgaccgctgcgccttatccggtaactatcgtcttgagtccaacccggtaagacacgacttatcgccactggcagcagccactggtaacaggattagcagagcgaggtatgtaggcggtgctacagagttcttgaagtggtggcctaactacggctacactagaaggacagtatttggtatctgcgctctgctgaagccagttaccttcggaaaaagagttggtagctcttgatccggcaaacaaaccaccgctggtagcggtggtttttttgtttgcaagcagcagattacgcgcagaaaaaaaggatctcaagaagatcctttgatcttttctacggggtctgacgctcagtggaacgaaaactcacgttaagggattttggtcatgagattatcaaaaaggatcttcacctagatccttttaaattaaaaatgaagttttaaatcaatctaaagtatatatgagtaaacttggtctgacagttaccaatgcttaatcagtgaggcacctatctcagcgatctgtctatttcgttcatccatagttgcctgactccccgtcgtgtagataactacgatacgggagggcttaccatctggccccagtgctgcaatgataccgcgagacccacgctcaccggctccagatttatcagcaataaaccagccagccggaagggccgagcgcagaagtggtcctgcaactttatccgcctccatccagtctattaattgttgccgggaagctagagtaagtagttcgccagttaatagtttgcgcaacgttgttgccattgctgcaggtcgggagcacaggatgacgcctaacaattcattcaagccgacaccgcttcgcggcgcggcttaattcaggagttaaacatcatgagggaagcggtgatcgccgaagtatcgactcaactatcagaggtagttggcgtcatcgagcgccatctcgaaccgacgttgctggccgtacatttgtacggctccgcagtggatggcggcctgaagccacacagtgatattgatttgctggttacggtgaccgtaaggcttgatgaaacaacgcggcgagctttgatcaacgaccttttggaaacttcggcttcccctggagagagcgagattctccgcgctgtagaagtcaccattgttgtgcacgacgacatcattccgtggcgttatccagctaagcgcgaactgcaatttggagaatggcagcgcaatgacattcttgcaggtatcttcgagccagccacgatcgacattgatctggctatcttgctgacaaaagcaagagaacatagcgttgccttggtaggtccagcggcggaggaactctttgatccggttcctgaacaggatctatttgaggcgctaaatgaaaccttaacgctatggaactcgccgcccgactgggctggcgatgagcgaaatgtagtgcttacgttgtcccgcatttggtacagcgcagtaaccggcaaaatcgcgccgaaggatgtcgctgccgactgggcaatggagcgcctgccggcccagtatcagcccgtcatacttgaagctaggcaggcttatcttggacaagaagatcgcttggcctcgcgcgcagatcagttggaagaatttgttcactacgtgaaaggcgagatcaccaaggtagtcggcaaataatgtctaacaattcgttcaagccgacgccgcttcgcggcgcggcttaactcaagcgttagatgctgcaggcatcgtggtgtcacgctcgtcgtttggtatggcttcattcagctccggttcccaacgatcaaggcgagttacatgatcccccatgttgtgcaaaaaagcggttagctccttcggtcctccgatcgaggatttttcggcgctgcgctacgtccgcgaccgcgttgagggatcaagccacagcagcccactcgaccttctagccgacccagacgagccaagggatctttttggaatgctgctccgtcgtcaggctttccgacgtttgggtggttgaacagaagtcattatcgcacggaatgccaagcactcccgaggggaaccctgtggttggcatgcacatacaaatggacgaacggataaaccttttcacgcccttttaaatatccgattattctaataaacgctcttttctcttaggtttacccgccaatatatcctgtcaaacactgatagtttaaactgaaggcgggaaacgacaatctgatccccatcaagcttggccagcttctgcaggtccgattgagacttttcaacaaagggtaatatccggaaacctcctcggattccattgcccagctatctgtcactttattgtgaagatagtggaaaaggaaggtggctcctacaaatgccatcattgcgataaaggaaaggccatcgttgaagatgcctctgccgacagtggtcccaaagatggacccccacccacgaggagcatcgtggaaaaagaagacgttccaaccacgtcttcaaagcaagtggattgatgtgatggtccgattgagacttttcaacaaagggtaatatccggaaacctcctcggattccattgcccagctatctgtcactttattgtgaagatagtggaaaaggaaggtggctcctacaaatgccatcattgcgataaaggaaaggccatcgttgaagatgcctctgccgacagtggtcccaaagatggacccccacccacgaggagcatcgtggaaaaagaagacgttccaaccacgtcttcaaagcaagtggattgatgtgatatctccactgacgtaagggatgacgcacaatcccactatccttcgcaagacccttcctctatataaggaagttcatttcatttggagaggacacagaaaaatttgctacattgtttcacaaacttcaaatattattcatttatttgtcagctttcaaactctttgtttcttgtttgttgattagatctg

SEQ ID NO: 12606 - DNA, 10076 bp, Artificial
  PMON17730
gaactgagccggttaggcagataatttccattgagaactgagccatgtgcaccttccccccaacacggtgagcgacggggcaacggagtgatccacatgggacttttcctagcttggctgccatttttggggtgaggccgttcgcggccgaggggcgcagcccctggggggatgggaggcccgcgttagcgggccgggagggttcgagaagggggggcaccccccttcggcgtgcgcggtcacgcgcacagggcgcagccctggttaaaaacaaggtttataaatattggtttaaaagcaggttaaaagacaggttagcggtggccgaaaaacgggcggaaacccttgcaaatgctggattttctgcctgtggacagcccctcaaatgtcaataggtgcgcccctcatctgtcagcactctgcccctcaagtgtcaaggatcgcgcccctcatctgtcagtagtcgcgcccctcaagtgtcaataccgcagggcacttatccccaggcttgtccacatcatctgtgggaaactcgcgtaaaatcaggcgttttcgccgatttgcgaggctggccagctccacgtcgccggccgaaatcgagcctgcccctcatctgtcaacgccgcgccgggtgagtcggcccctcaagtgtcaacgtccgcccctcatctgtcagtgagggccaagttttccgcgaggtatccacaacgccggcggccggccgcggtgtctcgcacacggcttcgacggcgtttctggcgcgtttgcagggccatagacggccgccagcccagcggcgagggcaaccagcccggtgagcgtcggaaagggtcgatcgaccgatgcccttgagagccttcaacccagtcagctccttccggtgggcgcggggcatgactatcgtcgccgcacttatgactgtcttctttatcatgcaactcgtaggacaggtgccggcagcgctctgggtcattttcggcgaggaccgctttcgctggagcgcgacgatgatcggcctgtcgcttgcggtattcggaatcttgcacgccctcgctcaagccttcgtcactggtcccgccaccaaacgtttcggcgagaagcaggccattatcgccggcatggcggccgacgcgctgggctacgtcttgctggcgttcgcgacgcgaggctggatggccttccccattatgattcttctcgcttccggcggcatcgggatgcccgcgttgcaggccatgctgtccaggcaggtagatgacgaccatcagggacagcttcaaggatcgctcgcggctcttaccagcctaacttcgatcattggaccgctgatcgtcacggcgatttatgccgcctcggcgagcacatggaacgggttggcatggattgtaggcgccgccctataccttgtctgcctccccgcgttgcgtcgcggtgcatggagccgggccacctcgacctgaatggaagccggcggcacctcgctaacggattcaccactccaagaattggagccaatcaattcttgcggagaactgtgaatgcgcaaaccaacccttggcagaacatatccatcgcgtccgccatctccagcagccgcacgcggcgcatctcgggcagcgttgggtcctggccacgggtgcgcatgatcgtgctcctgtcgttgaggacccggctaggctggcggggttgccttactggttagcagaatgaatcaccgatacgcgagcgaacgtgaagcgactgctgctgcaaaacgtctgcgacctgagcaacaacatgaatggtcttcggtttccgtgtttcgtaaagtctggaaacgcggaagtcagcgccctgcaccattatgttccggatctgcatcgcaggatgctgctggctaccctgtggaacacctacatctgtattaacgaagcgctggcattgaccctgagtgatttttctctggtcccgccgcatccataccgccagttgtttaccctcacaacgttccagtaaccgggcatgttcatcatcagtaacccgtatcgtgagcatcctctctcgtttcatcggtatcattacccccatgaacagaaatcccccttacacggaggcatcagtgaccaaacaggaaaaaaccgcccttaacatggcccgctttatcagaagccagacattaacgcttctggagaaactcaacgagctggacgcggatgaacaggcagacatctgtgaatcgcttcacgaccacgctgatgagctttaccgcagctgcctcgcgcgtttcggtgatgacggtgaaaacctctgacacatgcagctcccggagacggtcacagcttgtctgtaagcggatgccgggagcagacaagcccgtcagggcgcgtcagcgggtgttggcgggtgtcggggcgcagccatgacccagtcacgtagcgatagcggagtgtatactggcttaactatgcggcatcagagcagattgtactgagagtgcaccatatgcggtgtgaaataccgcacagatgcgtaaggagaaaataccgcatcaggcgctcttccgcttcctcgctcactgactcgctgcgctcggtcgttcggctgcggcgagcggtatcagctcactcaaaggcggtaatacggttatccacagaatcaggggataacgcaggaaagaacatgtgagcaaaaggccagcaaaaggccaggaaccgtaaaaaggccgcgttgctggcgtttttccataggctccgcccccctgacgagcatcacaaaaatcgacgctcaagtcagaggtggcgaaacccgacaggactataaagataccaggcgtttccccctggaagctccctcgtgcgctctcctgttccgaccctgccgcttaccggatacctgtccgcctttctcccttcgggaagcgtggcgctttctcatagctcacgctgtaggtatctcagttcggtgtaggtcgttcgctccaagctgggctgtgtgcacgaaccccccgttcagcccgaccgctgcgccttatccggtaactatcgtcttgagtccaacccggtaagacacgacttatcgccactggcagcagccactggtaacaggattagcagagcgaggtatgtaggcggtgctacagagttcttgaagtggtggcctaactacggctacactagaaggacagtatttggtatctgcgctctgctgaagccagttaccttcggaaaaagagttggtagctcttgatccggcaaacaaaccaccgctggtagcggtggtttttttgtttgcaagcagcagattacgcgcagaaaaaaaggatctcaagaagatcctttgatcttttctacggggtctgacgctcagtggaacgaaaactcacgttaagggattttggtcatgagattatcaaaaaggatcttcacctagatccttttaaattaaaaatgaagttttaaatcaatctaaagtatatatgagtaaacttggtctgacagttaccaatgcttaatcagtgaggcacctatctcagcgatctgtctatttcgttcatccatagttgcctgactccccgtcgtgtagataactacgatacgggagggcttaccatctggccccagtgctgcaatgataccgcgagacccacgctcaccggctccagatttatcagcaataaaccagccagccggaagggccgagcgcagaagtggtcctgcaactttatccgcctccatccagtctattaattgttgccgggaagctagagtaagtagttcgccagttaatagtttgcgcaacgttgttgccattgctgcaggtcgggagcacaggatgacgcctaacaattcattcaagccgacaccgcttcgcggcgcggcttaattcaggagttaaacatcatgagggaagcggtgatcgccgaagtatcgactcaactatcagaggtagttggcgtcatcgagcgccatctcgaaccgacgttgctggccgtacatttgtacggctccgcagtggatggcggcctgaagccacacagtgatattgatttgctggttacggtgaccgtaaggcttgatgaaacaacgcggcgagctttgatcaacgaccttttggaaacttcggcttcccctggagagagcgagattctccgcgctgtagaagtcaccattgttgtgcacgacgacatcattccgtggcgttatccagctaagcgcgaactgcaatttggagaatggcagcgcaatgacattcttgcaggtatcttcgagccagccacgatcgacattgatctggctatcttgctgacaaaagcaagagaacatagcgttgccttggtaggtccagcggcggaggaactctttgatccggttcctgaacaggatctatttgaggcgctaaatgaaaccttaacgctatggaactcgccgcccgactgggctggcgatgagcgaaatgtagtgcttacgttgtcccgcatttggtacagcgcagtaaccggcaaaatcgcgccgaaggatgtcgctgccgactgggcaatggagcgcctgccggcccagtatcagcccgtcatacttgaagctaggcaggcttatcttggacaagaagatcgcttggcctcgcgcgcagatcagttggaagaatttgttcactacgtgaaaggcgagatcaccaaggtagtcggcaaataatgtctaacaattcgttcaagccgacgccgcttcgcggcgcggcttaactcaagcgttagatgctgcaggcatcgtggtgtcacgctcgtcgtttggtatggcttcattcagctccggttcccaacgatcaaggcgagttacatgatcccccatgttgtgcaaaaaagcggttagctccttcggtcctccgatcgaggatttttcggcgctgcgctacgtccgcgaccgcgttgagggatcaagccacagcagcccactcgaccttctagccgacccagacgagccaagggatctttttggaatgctgctccgtcgtcaggctttccgacgtttgggtggttgaacagaagtcattatcgcacggaatgccaagcactcccgaggggaaccctgtggttggcatgcacatacaaatggacgaacggataaaccttttcacgcccttttaaatatccgattattctaataaacgctcttttctcttaggtttacccgccaatatatcctgtcaaacactgatagtttaaactgaaggcgggaaacgacaatctgatccccatcaagctagcttctgcaggtcctgctcgagcggccgcgttaacaagcttatatagatttcttaacgacaatctcgcattgtttattgcctcacatggtgacacacagctcttacatttgtccttatactcacggtgcagtgcactactactgtaaccccatggtctggaaaacagcaacgcaacctttctgccttggaacagcaagctatacagcgctatataacaaacttgcacaataatatgctacatttctgaaagcaaactccgcttatcttcgcgttaaggaatggtattacacttaaaatgacaaaatatcacactttagaaccccacgcctttacctaaaaaaaagttgattgatacaagaacaaatgtttacagcttgttacacctcccatcaagcaaagaaatggaatcttttattttatgtacacgtgtacgggtagctattgtttataaattgcagaagacacctcaacatgatggataattgtatacgcaaaactactttcctcgaattccccattctataaattccagttaaacttaattcgtaagatcaatcataattctcgagttgcaaacctctagaaccatcttccacacactcaagccacactattggagaacacacagggacaacacaccataagatccaagggaggcctccgccgccgccggtaaccaccccgcccctctcctctttctttctccgtttttttttccgtctcggtctcgatctttggccttggtagtttgggtgggcgagaggcggcttcgtgcgcgcccagatcggtgcgcgggaggggcgggatctcgcggctggggctctcgccggcgtggatccggcccggatctcgcggggaatggggctctcggatgtagatctgcgatccgccgttgttgggggagatgatggggggtttaaaatttccgccgtgctaaacaagatcaggaagaggggaaaagggcactatggtttatatttttatatatttctgctgcttcgtcaggcttagatgtgctagatctttctttcttctttttgtgggtagaatttgaatccctcagcattgttcatcggtagtttttcttttcatgatttgtgacaaatgcagcctcgtgcggagcttttttgtaggtagaagtgatcaaccatggaaattcaaaacaaagcaatgttgatcacttatgctgattcgttgggcaaaaacttaaaagatgttcatcaagtcttgaaagaagatattggagatgcgattggtggggttcatttgttgcctttcttcccttcaacaggtgatcgcggttttgcgccagccgattatactcgtgttgatgccgcatttggtgattgggcagatgtcgaagcattgggtgaagaatactatttgatgtttgacttcatgattaaccatatttctcgtgaatcagtgatgtatcaagattttaagaagaatcatgacgattcaaagtataaagatttctttattcgttgggaaaagttctgggcaaaggccggcgaaaaccgtccaacacaagccgatgttgacttaatttacaagcgtaaagataaggcaccaacgcaagaaatcacttttgatgatggcacaacagaaaacttgtggaatacttttggtgaagaacaaattgacattgatgttaattcagccattgccaaggaatttattaagacaacccttgaagacatggtaaaacatggtgctaacttgattcgtttggatgcctttgcgtatgcagttaaaaaagttgacacaaatgacttcttcgttgagccagaaatctgggacactttgaatgaagtacgtgaaattttgacaccattaaaggctgaaattttaccagaaattcatgaacattactcaatccctaaaaagatcaatgatcatggttacttcacctatgactttgcattaccaatgacaacgctttacacattgtattcaggtaagacaaatcaattggcaaagtggttgaagatgtcaccaatgaagcaattcacaacattggacacgcatgatggtattggtgtcgttgatgcccgtgatattctaactgatgatgaaattgactacgcttctgaacaactttacaaggttggcgcgaatgtcaaaaagacatattcatctgcttcatacaacaaccttgatatttaccaaattaactcaacttattattcagcattgggaaatgatgatgcagcatacttgttgagtcgtgtcttccaagtctttgcgcctggaattccacaaatttattacgttggtttgttggcaggtgaaaacgatatcgcgcttttggagtcaactaaagaaggtcgtaatattaaccgtcattactatacgcgtgaagaagttaagtcagaagttaagcgaccagttgttgctaacttattgaagctattgtcatggcgtaatgaaagccctgcatttgatttggctggctcaatcacagttgacacgccaactgatacaacaattgtggtgacacgtcaagatgaaaatggtcaaaacaaagctgtattaacagccgatgcggccaacaaaacttttgaaatcgttgagaatggtcaaactgttatgagcagtgataatttgactcagaactaatgagctcgaattctgcatgcgtttggacgtatgctcattcaggttggagccaatttggttgatgtgtgtgcgagttcttgcgagtctgatgagacatctctgtattgtgtttctttccccagtgttttctgtacttgtgtaatcggctaatcgccaacagattcggcgatgaataaatgagaaataaattgttctgattttgagtgcaaaaaaaaaggaattagatctgtgtgtgttttttggatccccggggcggccgctctagaactagtggatcccccccttaattaagggggctgcaggaattcataacttcgtataatgtatgctatacgaagttatagcttggtcgagtggaagctagctttccgatcctacctgtcacttcatcaaaaggacagtagaaaaggaaggtggcacctacaaatgccatcattgcgataaaggaaaggctatcattcaagatgcctctgccgacagtggtcccaaagatggacccccacccacgaggagcatcgtggaaaaagaagacgttccaaccacgtcttcaaagcaagtggattgatgtgatacttccactgacgtaagggatgacgcacaatcccactatccttcgcaagacccttcctctatataaggaagttcatttcatttggagaggacacgctgaaatcaccagtctctctctacaagatcggggatctctagctagacgatcgtttcgcatgattgaacaagatggattgcacgcaggttctccggccgcttgggtggagaggctattcggctatgactgggcacaacagacaatcggctgctctgatgccgccgtgttccggctgtcagcgcaggggcgcccggttctttttgtcaagaccgacctgtccggtgccctgaatgaactgcaggacgaggcagcgcggctatcgtggctggccacgacgggcgttccttgcgcagctgtgctcgacgttgtcactgaagcgggaagggactggctgctattgggcgaagtgccggggcaggatctcctgtcatctcaccttgctcctgccgagaaagtatccatcatggctgatgcaatgcggcggctgcatacgcttgatccggctacctgcccattcgaccaccaagcgaaacatcgcatcgagcgagcacgtactcggatggaagccggtcttgtcgatcaggatgatctggacgaagagcatcaggggctcgcgccagccgaactgttcgccaggctcaaggcgcgcatgcccgacggcgaggatctcgtcgtgacgcatggcgatgcctgcttgccgaatatcatggtggaaaatggccgcttttctggattcatcgactgtggccggctgggtgtggcggaccgctatcaggacatagcgttggctacccgtgatattgctgaagagcttggcggcgaatgggctgaccgcttcctcgtgctttacggtatcgccgctcccgattcgcagcgcatcgccttctatcgccttcttgacgagttcttctgagcgggactctggggttcgatccccaattcccgatcgttcaaacatttggcaataaagtttcttaagattgaatcctgttgccggtcttgcgatgattatcatataatttctgttgaattacgttaagcatgtaataattaacatgtaatgcatgacgttatttatgagatgggtttttatgattagagtcccgcaattatacatttaatacgcgatagaaaacaaaatatagcgcgcaaactaggataaattatcgcgcgcggtgtcatctatgttactagatcggggatcgggccactcgaccaagctataacttcgtataatgtatgctatacgaagttatcgcgccaaatcgtgaagtttctcatctaagcccccatttggacgtgaatgtagacacgtcgaaataaagatttccgaattagaataatttgtttattgctttcgcctataaatacgacggatcgtaatttgtcgttttatcaaaatgtactttcattttataataacgctgcggacatctacatttttgaattgaaaaaaaattggtaattactctttctttttctccatattgaccatcatactcattgctgatccatgtagatttcccggacatgaagccatttacaattgaatatatcctgccgccgctgccgctttgcacccggtggagcttgcatgttggtttctacgcag

SEQ ID NO: 12607 - DNA, 1473 bp, Leuconostoc mesenteroides
atggaaattcaaaacaaagcaatgttgatcacttatgctgattcgttgggcaaaaacttaaaagatgttcatcaagtcttgaaagaagatattggagatgcgattggtggggttcatttgttgcctttcttcccttcaacaggtgatcgcggttttgcgccagccgattatactcgtgttgatgccgcatttggtgattgggcagatgtcgaagcattgggtgaagaatactatttgatgtttgacttcatgattaaccatatttctcgtgaatcagtgatgtatcaagattttaagaagaatcatgacgattcaaagtataaagatttctttattcgttgggaaaagttctgggcaaaggccggcgaaaaccgtccaacacaagccgatgttgacttaatttacaagcgtaaagataaggcaccaacgcaagaaatcacttttgatgatggcacaacagaaaacttgtggaatacttttggtgaagaacaaattgacattgatgttaattcagccattgccaaggaatttattaagacaacccttgaagacatggtaaaacatggtgctaacttgattcgtttggatgcctttgcgtatgcagttaaaaaagttgacacaaatgacttcttcgttgagccagaaatctgggacactttgaatgaagtacgtgaaattttgacaccattaaaggctgaaattttaccagaaattcatgaacattactcaatccctaaaaagatcaatgatcatggttacttcacctatgactttgcattaccaatgacaacgctttacacattgtattcaggtaagacaaatcaattggcaaagtggttgaagatgtcaccaatgaagcaattcacaacattggacacgcatgatggtattggtgtcgttgatgcccgtgatattctaactgatgatgaaattgactacgcttctgaacaactttacaaggttggcgcgaatgtcaaaaagacatattcatctgcttcatacaacaaccttgatatttaccaaattaactcaacttattattcagcattgggaaatgatgatgcagcatacttgttgagtcgtgtcttccaagtctttgcgcctggaattccacaaatttattacgttggtttgttggcaggtgaaaacgatatcgcgcttttggagtcaactaaagaaggtcgtaatattaaccgtcattactatacgcgtgaagaagttaagtcagaagttaagcgaccagttgttgctaacttattgaagctattgtcatggcgtaatgaaagccctgcatttgatttggctggctcaatcacagttgacacgccaactgatacaacaattgtggtgacacgtcaagatgaaaatggtcaaaacaaagctgtattaacagccgatgcggccaacaaaacttttgaaatcgttgagaatggtcaaactgttatgagcagtgataatttgactcagaactaa
